(19) United States
(12) Patent Application Publication
(10) Pub. No.: US 2023/0167447 A1
(43) Pub. Date: Jun. 1, 2023

(54) Compositions for FNIP1/FNIP2 Gene Modulation and Methods Thereof

(71) Applicant: Genetic Intelligence, Inc, New York, NY (US)

(72) Inventors: Yao Zong Ng, Singapore (SG); Bertrand Adanve, New York, NY (US); Jonathan Lai, Smithtown, NY (US)

(21) Appl. No.: 18/060,179

(22) Filed: Nov. 30, 2022

Related U.S. Application Data
(60) Provisional application No. 63/284,187, filed on Nov. 30, 2021.

(51) Int. Cl. C12N 15/113; A61P 25/28

(52) U.S. Cl. CPC C12N 15/113; A61P 25/28; C12N 2310/141; C12N 2310/321; C12N 2310/323; C12N 2310/315; C12N 2310/3341; C12N 2310/346

(57) ABSTRACT

Compositions, systems, and methods are described herein to modulate (reduce/inhibit) expression/activity of FNIP1 and/or FNIP2 (“FNIP1/FNIP2”) in a cell, animal or human subject, which can prevent, ameliorate, or treat diseases (neuromuscular or neurodegenerative diseases). Methods are described for modulating (reducing/inhibiting) FNIP1/FNIP2 expression/activity via a modulator to regulate FNIP1/FNIP2 expression/activity. Also included are compositions containing modulators that regulate FNIP1/FNIP2 expression/activity. Pharmaceutical compositions, kits, and methods of delivering compositions used in modulating, reducing, or inhibiting FNIP1/FNIP2 expression/activity are described. Methods to develop, synthesize, or produce modulators, and treat ALS and related disorders (TDP-43 proteinopathies, oxidative stress, obesity, anemia, or ischemic diseases) are provided. Also provided are compositions, systems, and methods to modulate (increase) FNIP1/FNIP2 expression/activity in a cell, an animal or human subject, which can treat, prevent, or ameliorate diseases. Furthermore, described are diagnostic and testing methods to detect FNIP1/FNIP2 associated variants or expression/activity levels, and compositions comprising diagnostic or testing kits.

### CROSS-REFERENCE TO RELATED APPLICATIONS

[0001] This application claims priority to U.S. Provisional Application 63/284,187 (filed on Nov. 30, 2021), the disclosure of which is incorporated by reference in its entirety.

### REFERENCE TO AN ELECTRONIC SEQUENCE LISTING

[0002] The instant application contains a Sequence Listing, which has been filed electronically. The contents of the electronic sequence listing (071528_P4US3.xml; Size: 2,170,000 bytes; and Date of Creation: Nov. 29, 2022) is herein incorporated by reference in its entirety.

### FIELD OF THE INVENTION

[0003] This invention relates to compositions, systems, and methods for modulating, in particular reducing or inhibiting, the expression or activity of FNIP1 and/or FNIP2 in a cell, an animal or human subject. Such compositions, systems, and methods can be useful to treat, prevent, or ameliorate diseases, particularly neuromuscular or neurodegenerative diseases, such as amyotrophic lateral sclerosis (ALS), frontotemporal lobar degeneration (FTLD), Alzheimer's disease, retinal degeneration diseases such as age-related macular degeneration (AIMD), and other TDP-43 proteinopathies; as well as oxidative stress, obesity, anemia and ischemic diseases, such as cardiovascular disease, myocardial ischemia and peripheral vascular disease. This invention also relates to compositions, systems, and methods for modulating, in particular increasing, the expression or activity of FNIP1 and/or FNIP2 in a cell, an animal or human subject, which can be useful to treat, prevent, or ameliorate diseases, particularly inflammatory diseases, von Hippel-Lindau (VHL) disease, Birt-Hogg-Dube (BHD) syndrome, spontaneous pneumothorax, B cell deficiency, cardiomyopathy, as well as cancers such as fibrofolliculomas and kidney tumors.

### BACKGROUND

[0004] In the following discussion certain articles and processes will be described for background and introductory purposes. Nothing contained herein is to be construed as an “admission” of prior art. Applicant expressly reserves the right to demonstrate, where appropriate, that the articles and processes referenced herein do not constitute prior art under the applicable statutory provisions.

[0005] Amyotrophic lateral sclerosis (ALS), also known as Lou Gehrig's disease, is characterized by the progressive degeneration and loss of survival of both upper motor neurons in the brain and lower motor neurons in the spinal cord. This results in a lack of muscle stimulation, leading to muscle atrophy and fasciculations. Around 10% of ALS patients can survive for 10 or more years. However, most patients (around 90%) ultimately die from respiratory failure within 3 to 5 years from the onset of symptoms. ALS affects over 30,000 in the US alone, with over 5,600 new cases annually. There is currently a lack of accurate diagnostics and effective prophylaxis or therapies for ALS (Khairoalsindi and Abuzinadah, Neurology Research International, Article ID 6534150 (2018)). The drug Riluzole, which was approved by the FDA in 1995, can in most cases only extend the survival of ALS patients by 2-3 months. Edaravone (Radicava), which was approved by the FDA in 2017, slows the decline in physical function in ALS patients but is only effective for a subset of patients (around 7%), and long-term data on any survival benefit is still lacking. The lack of a long-term, effective therapy for ALS highlights the urgent need for the development of novel ALS therapies.

[0006] It is important to identify the genetic features in patients that have ALS, as an understanding of the molecular basis of the disease will aid the development of effective modulators that can be used as prophylactics or therapeutics to prevent or treat the disease, respectively. ALS is a complex disease that arises from the interplay of multiple genetic factors that are still poorly understood. 90-95% of ALS cases are sporadic, occurring apparently at random in individuals without a family history of ALS. In contrast, about 5-10% of ALS cases are familial, occurring in individuals with a family history of ALS (Renton et al., Nature Neuroscience, 17(1): 17-23 (2014)). To date, studies of familial and sporadic ALS cases have uncovered mutations in over 30 genes (e.g., C9orf72, SOD1, STMN2, NEK1, TARDBP, FUS, VCP, OPTN, SQSTM1, UBQLN2, hnRNPA1, MATR3, and others) that collectively account for less than 17% of all ALS cases (Renton et al., Nature Neuroscience, 17(1): 17-23 (2014)). However, the majority (>83%) of ALS cases have unknown causes.

[0007] In 2006, TAR DNA-binding protein 43 (TDP-43) was discovered to be a key component of insoluble and highly ubiquitinated aggregates in the brains of patients suffering from ALS and frontotemporal lobar dementia (FTLD). Despite the potentially diverse genetic etiology of ALS, strikingly, over 97% of all ALS cases (both sporadic and familial) and around 45% of frontotemporal lobar degeneration (FTLD; also called frontotemporal dementia (FTD) which is a type of FTLD) cases display TDP-43 positive aggregates in the cytoplasm of affected neurons (Prasad et al., Frontiers in Molecular Neuroscience, 12:25 (2019)). The TDP-43 present in aggregates can be unmodified TDP-43 or modified forms of TDP-43, such as phosphorylated TDP-43 (pTDP-43), ubiquitinated TDP-43 or truncated TDP-43. Thus, as used herein, TDP-43 can refer to unmodified and/or modified forms of TDP-43 including phosphorylated, ubiquitinated or truncated forms of TDP-43. In particular, phosphorylation of TDP-43 at Ser-379, Ser-403, Ser-404, and especially Ser-409/Ser-410, is a key signature of TDP-43 proteinopathies, including ALS (Neumann et al., Acta Neuropathol., 117(2):137-149 (2009)). Furthermore, mutations in TARDBP, the gene that encodes for TDP-43, have been associated with familial cases of ALS, thus cementing its central role in ALS. In general, once initiated, the aggregation of TDP-43 in the cytoplasm can proceed in a self-propagating manner, involving polymerization of RNA and protein molecules to form toxic products that are resistant to proteolysis. In healthy cells, TDP-43 is predominantly localized to the nucleus and carries out multiple important RNA processing functions there, including regulating RNA transcription, RNA splicing, RNA transport, and stability. Its multi-domain structure allows it to be a central modulator of multiple processes. For example, it comprises two RNA recognition motifs (RRM1 and RRM2) that mediate interactions with RNA and DNA, a C-terminal glycine-rich domain that mediates interactions with other proteins, as well as a nuclear localization signal (NLS) and nuclear export signal (NES) that regulates its shuttling between the nucleus and cytoplasm. Thus, TDP-43's involvement in ALS pathogenesis can be caused by a toxic gain-of-function mechanism due to increased levels of pathological TDP-43 aggregates in the cytoplasm, or a loss-of-function mechanism due to a decrease of functional TDP-43 levels in the nucleus, or a combination of both. The role of TDP-43 in ALS is described by Prasad et al. (Prasad et al., Frontiers in Molecular Neuroscience, 12:25 (2019)) and Scotter et al. (Scotter et al., Neurotherapeutics, 12(2): 352-363 (2015)), the disclosures of which, along with their references, are incorporated herein in its entirety.

[0008] Although insoluble cytoplasmic TDP-43 aggregates are the hallmark of ALS, there is evidence to suggest that biomolecular condensates of TDP-43, which are transient, liquid-like droplets of TDP-43, are the neurotoxic species (Gasset-Rosa et al., Neuron 102(2): 339-357 (2019)). These condensates are formed by the prion-like, low-complexity intrinsically disordered region (IDR) in the C-terminal domain of TDP-43, which allows it to undergo liquid-liquid phase separation (LLPS) in the cell. In fact, the formation of insoluble cytoplasmic TDP-43 aggregates has been suggested to be a defense mechanism of the cell to sequester TDP-43, to reduce the formation of toxic TDP-43 biomolecular condensates in the cytoplasm. As used herein, the term TDP-43 aggregates can refer to biomolecular condensates of TDP-43, as well as to any aggregates of TDP-43, whether soluble or not.

[0009] Consequently, a decrease in the levels of pathological TDP-43 aggregates in the cytoplasm, or an increase in the levels of normal TDP-43 in the nucleus, or a combination of both, are likely to be effective to treat, ameliorate, or prevent ALS or represent an indication thereof as a biomarker. Likewise, decreasing TDP-43 aggregates in the cytoplasm are likely to be effective to treat, ameliorate, or prevent other diseases, particularly neuromuscular or neurodegenerative diseases, involving either an increase in levels of pathological TDP-43 aggregates in the cytoplasm, or a decrease of functional TDP-43 levels in the nucleus, or a combination thereof. Such diseases are termed TDP-43 proteinopathies, examples of which include but are not limited to, ALS, Alzheimer's disease, argyrophilic grain disease, vascular dementia, frontotemporal dementia (FTD, FTD-TDP-43, and FTD-tau) and the greater group of frontotemporal lobar degeneration (FTLD), semantic dementia, dementia with Lewy bodies, polyglutamine diseases, Huntington's disease, spinocerebellar ataxia, inclusion body myopathy, inclusion body myositis, hippocampal sclerosis, parkinsonism, Parkinson's disease (PD), Perry syndrome, ALS-parkinsonism dementia complex of Guam, primary lateral sclerosis (PLS), hereditary spastic paraplegia (HSP), pseudobulbar palsy, Mills' syndrome, monomelic amyotrophy, post-polio syndrome (PPS), madras motor neuron disease (MMND), progressive muscular atrophy (PMA), spinal muscular atrophy (SMA), spinal and bulbar muscular atrophy (SBMA), progressive bulbar palsy (PBP), retinal degeneration diseases such as age-related macular degeneration (AMD), retinitis pigmentosa (RP), and glaucoma, wherein in each case at least a sub-population of patients can exhibit an increase in levels of TDP-43 aggregates in the cytoplasm. TDP-43 proteinopathies are further described in Gendron and Josephs (Gendron and Josephs, Neuropathol. Appl. Neurobiol. 36:97-112 (2010)), Lagier-Tourenne et al. (Lagier-Tourenne et al., Hum. Mol. Gen. 19(1):R46-R64 (2010)), and Matsukawa et al. (Matsukawa et al., Journal of Biological Chemistry, 291(45): 23464-23476 (2016)), the disclosures of which, together with references cited therein, are incorporated herein in their entirety.

### SUMMARY

[0010] Compositions, systems, and methods are described herein for the modulation, and in particular the reduction or inhibition, of expression of the FNIP1 and/or FNIP2 gene or the activity of FNIP1 and/or FNIP2 protein in a cell, animal or human subject, which can be used to prevent, ameliorate, or treat diseases, particularly neuromuscular or neurodegenerative diseases, such as ALS, FTLD, Alzheimer's disease, retinal degeneration diseases such as age-related macular degeneration (AMD), or other TDP-43 proteinopathies; as well as oxidative stress, obesity, anemia or ischemic diseases, such as cardiovascular disease, myocardial ischemia and peripheral vascular disease. Also described herein are compositions, systems and methods for modulating, in particular increasing, the expression and/or activity of FNIP1 and/or FNIP2 gene or protein in a cell, animal or human subject, which can be used to treat, prevent or ameliorate diseases, particularly inflammatory diseases, von Hippel-Lindau (VHL) disease, Birt-Hogg-Dube (BHD) syndrome, spontaneous pneumothorax, B cell deficiency, cardiomyopathy, as well as cancers, and other diseases that are linked to loss-of-function of FNIP1 and/or FNIP2. Methods are described for the modulation of FNIP1 and/or FNIP2 expression or activity, comprising the use of a modulator to increase or decrease FNIP1 and/or FNIP2 expression or activity. Included also herein are compositions for modulators used to increase or decrease FNIP1 and/or FNIP2 expression or activity. Related pharmaceutical compositions, kits, and methods of delivery of compositions used in modulating FNIP1 and/or FNIP2 expression or activity are also described. Methods are also described for the development, synthesis, and production of modulators, as well as for therapeutic treatment of diseases, such as ALS and other related disorders such as other TDP-43 proteinopathies, oxidative stress, obesity, anemia and ischemic diseases; as well as inflammatory diseases, von Hippel-Lindau (VHL) disease, Birt-Hogg-Dube (BHD) syndrome, spontaneous pneumothorax, B cell deficiency, cardiomyopathy, and cancers, such as fibrofolliculomas and kidney tumors. Furthermore, methods for diagnostics and testing comprising detecting FNIP1 and/or FNIP2 associated variants, or FNIP1 and/or FNIP2 expression or activity levels, as well as compositions comprising kits for diagnostics and testing, are described herein.

[0011] In some embodiments, provided herein are antisense modulators to modulate FNIP1 and/or FNIP2 expression or activity. In some embodiments, provided herein are antisense modulators to inhibit or reduce FNIP1 and/or FNIP2 expression or activity. In other embodiments, provided herein are antisense modulators to increase FNIP1 and/or FNIP2 expression or activity. In one embodiment, antisense modulators comprise antisense oligonucleotides (ASOs). In one embodiment, the ASO is between 12-30 nucleobases in length. In certain embodiments, the ASO is at least 70% complementary, alternatively at least 80% complementary, alternatively at least 85% complementary, alternatively at least 90% complementary, alternatively at least 95% complementary, alternatively at least 98% complementary, alternatively 100% complementary to an equal length portion of at least one target sequence described in SEQ ID NOs: 1-15. In certain embodiments, the ASO is at least 70% identical, alternatively at least 80% identical, alternatively at least 85% identical, alternatively at least 90% identical, alternatively at least 95% identical, alternatively at least 98% identical, alternatively 100% identical to an equal length portion of at least one sequence described in SEQ ID NOs: 16-1494. In one embodiment, the ASO includes at least one modification to an internucleoside linkage, a sugar, or a nucleobase component. In one embodiment, all of the internucleoside linkages of the ASO comprise phosphorothioate modifications. In another embodiment, all of the sugar components of the ASO comprise the 2′-MOE modification. In another embodiment, the ASO comprises a gapped sequence consisting of a central sequence of oligonucleotides without sugar modifications, which are flanked on both sides by wing sequences consisting of 2′-MOE modified nucleotides. In another embodiment, the ASO comprises a gapped sequence consisting of a central sequence of deoxynucleotides wherein the second nucleotide of the central sequence from the 5′ end of the ASO contains a 2′-OMe sugar modification, and which gapped sequence is flanked on both sides by wing sequences consisting of 2′-MOE modified nucleotides. In one embodiment, all cytosine nucleobases of the ASO comprise 5-methylcytosine modifications. In certain embodiments, the ASO is conjugated to one or more molecules, such as a peptide or polypeptide, lipid, sugar, nucleotide or oligonucleotide, other polymer, cleavage agent, transport agent, intercalating agent, molecular beacon, hybridization-triggered crosslinking agent, lipophilic agent, or hydrophilic agent. In one embodiment, the ASO is conjugated to one or more N-acetyl galactosamine (GalNAc) residue or other such conjugates or complexes.

[0012] In some embodiments, antisense modulators comprise modulators used in RNA interference (RNAi), such as siRNAs, miRNAs and shRNAs. In one embodiment, the antisense modulator is a siRNA. In one embodiment, the antisense region of the siRNA is 19 to 29 nucleotides in length. In certain embodiments, the antisense region of the siRNA is at least 70% complementary, alternatively at least 80% complementary, alternatively at least 85% complementary, alternatively at least 90% complementary, alternatively at least 95% complementary, alternatively at least 98% complementary, alternatively 100% complementary to an equal length portion of at least one target sequence described in SEQ ID NOs: 1-15. In certain embodiments, the antisense region of the siRNA is at least 70% identical, alternatively at least 80% identical, alternatively at least 85% identical, alternatively at least 90% identical, alternatively at least 95% identical, alternatively at least 98% identical, alternatively 100% identical to an equal length portion of at least one sequence described in SEQ ID NOs: 16-1494, wherein thymine is replaced by uracil. In one embodiment, the first two nucleotides at the 5′ end of the sense strand, as well as the first two nucleotides at the 5′ end of the antisense strand, of the siRNA are modified with a 2′-O-alkyl group, such as a 2′-OMe group.

[0013] In other embodiments, provided herein are modulators other than antisense modulators, for example other oligonucleotide modulators (e.g., ribozyme, deoxyribozyme, or aptamers), antibody modulators, peptide modulators, small molecule modulators, and nucleic acid vectors, for modulating the expression or activity of FNIP1 and/or FNIP2 in a cell, an animal or human subject. In some embodiments, provided herein are modulators for gene therapy. In one embodiment, the modulator for gene therapy comprises a nucleic acid vector encoding one or more functional copies of FNIP1 and/or FNIP2, as described in SEQ ID NOs: 1-15, in order to increase the levels of FNIP1 and/or FNIP2 in the cell. In another embodiment, the nucleic acid vector is modified to enable viral delivery. In other embodiments the nucleic acid vector is modified to enable non-viral delivery. In certain embodiments, provided herein are antibody modulators that are chosen from the set of modulators described in Table 14. In some embodiments, the antibody, antibody fragment, monobody or peptide modulator binds to the same epitope as at least one antibody modulator described in Table 14. In other embodiments, the antibody, antibody fragment, monobody or peptide modulator binds to a different epitope to that of the modulators described in Table 14. In some embodiments, the antibody, antibody fragment, monobody, or peptide modulator comprises a complementarity-determining region (CDR) that is at least 30%, 40%, 50%, 60%, 70%, 75%, 80%, 85%, 90%, 95%, 96%, 97%, 98%, 99%, or 100% similar to the CDR of at least one antibody modulator described in Table 14, as assessed by sequence alignment or other scoring methods known in the art. In certain embodiments, provided herein are small molecule modulators comprising at least one exemplar small molecule modulator described in Table 12 and/or Table 13. In certain embodiments, the small molecule modulator comprises at least one scaffold described in Table 12 and/or Table 13. In some embodiments, the small molecule modulators, or part thereof, have a Tanimoto index of at least 0.20, 0.30, 0.40, 0.50, 0.60, 0.70, 0.75, 0.80, 0.85, 0.90, 0.95, 0.96, 0.97, 0.98, 0.99, or 1.00 compared to at least one exemplar or scaffold described in Table 12 and/or Table 13.

[0014] In certain embodiments, provided herein are methods and compositions for the delivery of antisense modulators into a cell, an animal, or a human subject, in order to modulate the expression or activity of FNIP1 and/or FNIP2. In one embodiment, delivery methods and compositions comprise a transfection reagent, such as a liposomal-based or amine-based transfection reagent. In one embodiment, the antisense modulators are delivered naked without a transfection reagent. In one embodiment, the antisense modulators are delivered via a nucleic acid vector. In one embodiment, the method of delivery includes one or more of the common delivery methods used to deliver drugs, such as intrathecal injection.

[0015] One set of embodiments provide for pharmaceutical compositions, comprising a modulator and a pharmaceutically acceptable carrier or diluent, which can be administered to a cell, an animal, or a human subject to modulate, and in particular to reduce or inhibit, the expression or activity of FNIP1 and/or FNIP2 in the cell, animal or human subject. Another set of embodiments provide for pharmaceutical compositions, comprising a modulator and a pharmaceutically acceptable carrier or diluent, which can be administered to a cell, an animal, or a human subject to modulate, and in particular to increase, the expression or activity of FNIP1 and/or FNIP2 in the cell, animal or human subject. In one embodiment, the pharmaceutical composition is administered intrathecally. Such treatment methods can be used to treat, ameliorate, or prevent ALS and other diseases, such as other TDP-43 proteinopathies, oxidative stress, obesity, anemia, or ischemic diseases; as well as inflammatory diseases, von Hippel-Lindau (VHL) disease, Birt-Hogg-Dube (BHD) syndrome, spontaneous pneumothorax, B cell deficiency, cardiomyopathy, and cancers. In one embodiment, a pharmaceutical composition described herein is co-administered with one or more other pharmaceutical agents, such as for example, Riluzole (Rilutek), Dexpramipexole, Edaravone, Tofersen, Baclofen (Lioresal), or other drug that is typically administered to treat, ameliorate, or manage symptoms in ALS. In another embodiment, a pharmaceutical composition described herein is co-administered with one or more pharmaceutical agents or other drug that is typically administered to treat, ameliorate, or manage symptoms in oxidative stress, obesity, anemia or ischemic diseases; as well as inflammatory diseases, von Hippel-Lindau (VHL) disease, Birt-Hogg-Dube (BHD) syndrome, spontaneous pneumothorax, B cell deficiency, cardiomyopathy, and cancers.

[0016] Some embodiments provide for the testing and monitoring of FNIP1 and/or FNIP2 levels or activity in a cell, an animal, or a human subject. In some embodiments, these tests can be used for the purposes of diagnosing a disease such as ALS, other TDP-43 proteinopathy, oxidative stress, obesity, anemia, or ischemic disease; as well as inflammatory disease, von Hippel-Lindau (VHL) disease, Birt-Hogg-Dube (BHD) syndrome, spontaneous pneumothorax, B cell deficiency, cardiomyopathy, and cancer. In other embodiments, these tests can be used for the purposes of determining risk or susceptibility to said diseases. In some embodiments, these tests can be used for the purposes of monitoring the progression or response to a treatment for said diseases. In other embodiments, provided herein are methods of determining risk or susceptibility, methods of diagnosis, methods of predicting prognosis, or methods of assessing a human individual for a probability of a response to a therapeutic method and/or modulator for neuromuscular or neurodegenerative diseases, such as, for example, FTLD, Alzheimer's Disease, retinal degeneration diseases such as age-related macular degeneration (AMD), and other TDP-43 proteinopathies disclosed herein. In other embodiments, provided herein are methods of determining risk or susceptibility, methods of diagnosis, methods of predicting prognosis, or methods of assessing a human individual for a probability of a response to a therapeutic method and/or modulator for oxidative stress, obesity, anemia, or ischemic disease; as well as inflammatory disease, von Hippel-Lindau (VHL) disease, Birt-Hogg-Dube (BHD) syndrome, spontaneous pneumothorax, B cell deficiency, cardiomyopathy, and cancer.

### DETAILED DESCRIPTION

[0017] The following description is presented to enable one of ordinary skill in the art to make and use the invention and is provided in the context of a patent application and its requirements. Various modifications to the example embodiments and the genetic principles and features described herein will be readily apparent. The example embodiments are mainly described in terms of particular processes and systems provided in particular implementations. However, the processes and systems will operate effectively in other implementations. Phrases such as “example embodiment”, “one embodiment”, and “another embodiment” can refer to the same or different embodiments.

[0018] The example embodiments will be described with respect to methods and compositions having certain components. However, the methods and compositions can include more or less components than those shown, and variations in the arrangement and type of the components can be made without departing from the scope of the invention.

[0019] The example embodiments will also be described in the context of methods having certain steps. However, the methods and compositions operate effectively with additional steps and steps in different orders that are not inconsistent with the example embodiments. Thus, the present invention is not intended to be limited to the embodiments shown but is to be accorded the widest scope consistent with the principles and features described herein and as limited only by appended claims.

[0020] It should be noted that as used herein and in the appended claims, the singular forms “a,” “and,” and “the” include plural referents unless the context clearly dictates otherwise. Thus, for example, reference to the effect of “a neuron” can refer to the effect of one or a combination of neurons, and reference to “a method” includes reference to equivalent steps and processes known to those skilled in the art, and so forth.

[0021] Where a range of values is provided, it is to be understood that each intervening value between the upper and lower limit of that range—and any other stated or intervening value in that stated range—is encompassed within the invention. Where the stated range includes upper and lower limits, ranges excluding either of those limits are also included in the invention.

[0022] Unless expressly stated, the terms used herein are intended to have the plain and ordinary meaning as understood by those of ordinary skill in the art. The following definitions are intended to aid the reader in understanding the present invention, but are not intended to vary or otherwise limit the meaning of such terms unless specifically indicated. All publications mentioned herein are incorporated by reference for the purpose of describing and disclosing the formulations and processes that are described in the publication and which might be used in connection with the presently described invention.

[0023] Those skilled in the art will recognize, or be able to ascertain using no more than routine experimentation, many equivalents to the specific embodiments of the invention described herein in the detailed description and figures. Such equivalents are intended to be encompassed by the claims.

[0024] For simplicity, in the present document certain embodiments are described with respect to use of certain methods. It will become apparent to one skilled in the art upon reading this disclosure that the invention is not intended to be limited to a specific use, and can be used in a wide array of implementations.

[0025] Throughout this specification, the oligonucleotides and polypeptides referred to include all enantiomers, stereoisomers, racemic mixtures, optically pure isomer forms, complementary sequences, modified or analog forms, and both deoxyribonucleotide (or DNA) and ribonucleotide (or RNA) forms.

### Definitions

[0026] Unless defined otherwise, all technical and scientific terms used herein have the same meaning as commonly understood by the ordinary person skilled in the art to which the embodiments pertain.

[0027] “Nucleic acid sequence data” as used herein refers to any sequence data obtained from nucleic acids from an individual. Such data includes, but is not limited to, deoxyribonucleotide (DNA) data, ribonucleotide (RNA) data, whole genome sequencing data, exome sequencing data, genotyping data, transcriptome sequencing data, complementary DNA or cDNA library sequencing data, and the like. Nucleic acid sequences are written in the 5′ to 3′ direction.

[0028] “Nucleobases”, or “bases”, are used interchangeably and refer to nitrogen-containing compounds that form nucleosides, which in turn are components of nucleotides. The five primary or natural nucleobases are adenine (A), cytosine (C), guanine (G), thymine (T), and uracil (U). Other nucleobases, such as synthetic or modified nucleobases, are included herein and detailed below.

[0029] “Nucleotide” refers to a compound comprising a nucleoside and a linkage group, commonly a phosphate linkage group. Nucleotides include both natural and modified nucleotides.

[0030] “Sugar” or “sugar component” can mean a natural or modified sugar, which includes ribose sugars and deoxyribose sugars found in RNA and DNA, respectively, as well as other modified sugars detailed below.

[0031] “Nucleoside” refers to a compound comprising both a nucleobase and sugar component. Nucleosides can be natural or modified.

[0032] “Nucleoside linkage” or “internucleoside” linkage refers to the covalent linkages of adjacent nucleosides. Nucleoside linkages comprise the primary linkages between nucleotides in an oligonucleotide.

[0033] “Chimeric compound” refers to a compound, most commonly an oligonucleotide, that comprises at least one nucleotide having at least one nucleobase, nucleoside linkage, or sugar component that differs from at least one other nucleotide within the same compound. This difference can originate from variations in how components of nucleotides within the same compound are modified or in some cases left unmodified. In some embodiments, similar or identical modifications to nucleotides in chimeric compounds can be grouped together spatially in regions. Any modification or combination of modifications described herein or elsewhere, including those modifications known to persons skilled in the art, can be included in a chimeric compound.

[0034] “Motif” refers to a region or subsequence within the sequence of an oligonucleotide, or polypeptide, that has a specific functional or biological significance. Examples of motifs include nucleobase sequences within an oligonucleotide, such as DNA or RNA, which are recognized by a DNA or RNA-binding protein. Other examples of motifs include amino acid sequences within a polypeptide that is responsible for a specific function of the polypeptide.

[0035] “Nucleic acid sequence”, “nucleobase sequence”, “nucleotide sequence”, or simply “sequence” are used interchangeably and refer to the sequence of nucleobases on a nucleic acid molecule or oligonucleotide.

[0036] “Coding DNA” refers to a DNA sequence that is transcribed to messenger RNA (mRNA) and subsequently translated to a polypeptide or protein.

[0037] “Non-coding DNA” refers to a DNA sequence that does not encode a polypeptide, including, but not limited to, a DNA sequence that is transcribed to a functional RNA (e.g., non-coding RNA (ncRNA), transfer RNA (tRNA), ribosomal RNA (rRNA), regulatory RNA, microRNA (miRNA), small interfering RNA (siRNA), Piwi interacting RNA (piRNA) or long noncoding RNA (lncRNA)); a DNA sequence that contains a regulatory element such as a promoter, enhancer, terminator, insulator or silencer that affects the expression of one or more genes; a DNA sequence that performs a structural function (e.g., centromere, telomere, satellite); a DNA sequence that serves as a replication origin; a DNA sequence that is located within a protein-coding gene but is removed before a protein is made, otherwise known as an intron; or otherwise any DNA sequence with unknown function.

[0038] The term “mRNA” refers to messenger RNA, the message derived by the transcription of coding DNA to form precursor mRNA (pre-mRNA). Pre-mRNA is subsequently processed into mature mRNA by splicing to remove introns, and addition of a 5′ cap and poly-A tail. Mature mRNA is used as a template by ribosomes for translation into polypeptides. The term “mRNA” as used herein includes pre-mRNA, sometimes also referred to as hnRNA (heterogeneous nuclear RNA), mature mRNA, as well as mRNA in any stage of processing.

[0039] The term “gene” as used herein, refers to a DNA sequence that is transcribed to mRNA and subsequently translated to a polypeptide, and/or a DNA sequence that is transcribed to a functional RNA.

[0040] “Polypeptide”, “oligopeptide”, “peptide” and “protein” are used interchangeably, and refer to a polymer of two or more amino acids.

[0041] “Oligonucleotide” refers to a polymer comprising two or more nucleotides, and can also refer to a modified oligonucleotide. “Modified oligonucleotide” refers to an oligonucleotide comprising at least one modification to a nucleobase, nucleoside linkage, or sugar component.

[0042] An “allele”, also referred to as a “variant”, or “polymorphism”, refers to one of at least two different nucleotide sequence variations at a given position (locus) in the genome. Thus, a specific allele of a polymorphic site refers to a specific version of the sequence with respect to a polymorphic site. A “variant” or “polymorphism” can also refer to a specific allele of a polymorphic site that differs from a reference genome.

[0043] “Polymorphic marker”, also referred to as “polymorphic site” or simply as “marker”, refers to a genomic site with at least two sequence variants, or at least two alleles. Thus, genetic association with a polymorphic marker, refers to association with at least one specific allele of that polymorphic marker. “A marker” can also refer to a specific allele of a polymorphic marker. A polymorphic marker can refer to any type of sequence variation found in the genome, including but not limited to single nucleotide polymorphisms (SNPs), curated SNPs (cSNPs), insertions, deletions, copy number variations (CNVs), codon expansions, methylation status, translocations, duplications, repeat expansions, rearrangements, multi-base polymorphisms, splice variants, microsatellite polymorphisms etc. A “marker” can also refer to a “biomarker”.

[0044] A “single nucleotide polymorphism” or “SNP” is a type of variation of DNA where a single nucleotide at a specific location in a genome differs between two or more individuals, or two or more populations. Most SNPs have two alleles; in such cases, an individual is either homozygous for one allele at the polymorphic site, or heterozygous for both alleles.

[0045] An “insertion” or “deletion” is a variant with additional nucleotides or fewer nucleotides respectively compared to a reference DNA sequence.

[0046] A “microsatellite” is a type of polymorphic marker where there are multiple small repeats of bases that are 2-8 nucleotides in length.

[0047] A “haplotype” refers to a segment of genomic DNA containing a specific combination of alleles along the segment that tends to be inherited together in human evolution.

[0048] “Linkage disequilibrium” refers to the non-random association of alleles at different loci in a given population.

[0049] The term “associated with” refers to and can be used interchangeably with “within”, or “correlated with”, or “in linkage disequilibrium with”, or “functionally related with”, or any combination of the terms.

[0050] “Susceptibility” refers to the tendency, propensity or risk of an individual to develop a particular phenotype (e.g., a trait or a disease), or to being more or less able to resist developing a particular phenotype. The term encompasses decreased susceptibility to, or decreased risk of, or a protection against a disease. The term also encompasses an increased susceptibility to, or increased risk of developing, a disease.

[0051] The term “and/or” indicates “one or the other or both”. In other words, the term indicates that both or either of the items are involved.

[0052] The term “biomarker” refers to a biological molecule such as a protein, a polypeptide, a small molecule, a metabolite or a nucleic acid sequence that is associated with a phenotype such as a disease, and whose measurement can be used for determining a susceptibility to the disease, or prognosis for the disease, or diagnosis for the disease, or determining a response to a therapy for the disease.

[0053] The term “look-up table” is a table that links one form of data to another, or one or more forms of data to a predicted outcome (e.g., a trait, a disease, or other phenotype). Look-up tables can contain information about one or more polymorphic markers, one or more alleles at each polymorphic marker, and a correlation between alleles for a polymorphic marker and a particular phenotype (e.g., a trait or a disease).

[0054] A “computer-readable medium” is a medium for storage of information that is accessible by a computer interface that is custom-built or available commercially. Some examples of computer-readable media include, but are not limited to, optical storage media, magnetic storage media, memory, punch cards, or other commercially available media.

[0055] A “nucleic acid sample” refers to a DNA and/or RNA sample obtained from an individual. In certain embodiments (e.g., in detecting specific polymorphic markers and/or haplotypes), the nucleic acid sample comprises genomic DNA. Genomic DNA samples can be obtained from any source that contains genomic DNA, such as blood, saliva, tissue sample, cerebrospinal fluid, amniotic fluid etc.

[0056] A “sample” in general refers to any sample, such as a biological sample, obtained from an individual.

[0057] A “subject”, a “patient” or an “individual” refers to a living multi-cellular vertebrate organism, which includes both human and non-human mammals, unless otherwise indicated.

[0058] The term “therapeutic agent” refers to an agent that can be used for preventing, treating, or ameliorating symptoms associated with a disease.

[0059] The term “response to a therapeutic method”, “response to a therapy”, or “response to administration of a modulator” refers to the result of any kind of treatment on an individual, and includes beneficial, neutral, and adverse effects.

[0060] The term “therapeutically effective amount” refers to an amount of a therapeutic agent, which when administered alone or together with one or more additional therapeutic agents, induces the desired response, such as decreasing signs and symptoms associated with disease. Often, the therapeutically effective amount provides the desired response without causing significant side effects to the administered subject.

[0061] The term “disease-associated nucleic acid” refers to a nucleic acid that has been found to be associated or correlated with the disease. This includes markers and haplotypes described herein, and/or markers and haplotypes in strong linkage disequilibrium therewith.

[0062] The term “modulator” refers to a compound that affects the signaling, activity or expression of polypeptides or nucleic acid sequences (also referred to as “modulates”), and includes both activators and inhibitors. A modulator that increases or upregulates the signaling, activity or expression of polypeptides or nucleic acid sequences is referred to as an “activator”. A modulator that inhibits, reduces, decreases or downregulates the signaling, activity or expression of polypeptides or nucleic acid sequences is referred to as an “inhibitor”. “Modulation” refers to the act of modulating as defined above and can be performed with a modulator. Unless specified otherwise, “modulate” or “modulation” refers to the act of modulating as defined above, and includes both increasing or upregulating the signaling, activity or expression of polypeptides or nucleic acid sequences, as well as inhibiting, reducing, decreasing or downregulating the signaling, activity or expression of polypeptides or nucleic acid sequences.

[0063] The term “antisense modulator” refers to a modulator that affects the signaling, activity or expression of at least one nucleic acid sequence through some form of complementary binding or hybridization to the nucleic acid molecule. Common forms of antisense modulators include ASOs as well as nucleic acids used in the RNAi mechanism for gene modulation, including, but not limited to, miRNA, siRNA, and short hairpin RNA (shRNA).

[0064] The term “amplification” or to “amplify” refers to increasing the number of copies of a sequence of nucleotides. An example of amplification is the “polymerase chain reaction”, in which a sample containing sequences of nucleotides is contacted with a pair of oligonucleotide primers. The primers hybridize with a nucleotide sequence, are extended under suitable conditions, and then are dissociated from the nucleotide sequence. This process is repeated to increase the number of copies of a sequence of nucleotides. Other methods can be used for amplification and are known to a person with ordinary skill in the art.

[0065] The term “complementary” refers to complementary nucleobase pairing between two nucleotide sequences on either two different nucleotide strands or two regions of the same nucleotide strand. It is known in the art that adenine bases form complementary pairing with thymine or with uracil bases through the formation of specific hydrogen bonds. Likewise, cytosine bases form complementary pairing with guanine bases through the formation of specific hydrogen bonds. Other descriptions of complementary pairing are detailed herein.

[0066] The term “composition” refers to a compound that comprises one or more molecules. The composition can contain oligonucleotides, polypeptides, small molecules, other types of molecules, or a combination thereof. A “pharmaceutical composition” refers to a composition that includes a modulator, or at least one molecule considered to be a pharmaceutical agent.

[0067] The term “isolated” refers to a purified, enriched or concentrated population of molecules. “Isolated” also refers to the act of enriching or concentrating a particular molecule, compound or complex such that its purity is increased.

[0068] The term “tissue” refers to an aggregate of cells that form a specific physiological function in an organism.

[0069] The term “delivery”, when used in the context of drugs, agents, or pharmaceutical compositions, refers to the administration of a drug, agent, or pharmaceutical composition to an assay mixture, a cell in culture, an animal, or a human subject or patient.

[0070] A “carrier”, when used in the context of drugs, agents, or pharmaceutical composition is one or more molecules that is used to aid the delivery of one or more other molecules.

[0071] ALS is part of a broader spectrum of disorders known as “motor neuron disease” (MND) that includes primary lateral sclerosis (PLS), hereditary spastic paraplegia (HSP), pseudobulbar palsy, Mills' syndrome, monomelic amyotrophy, post-polio syndrome (PPS), madras motor neuron disease (MMND), progressive muscular atrophy (PMA), spinal muscular atrophy (SMA), spinal and bulbar muscular atrophy (SBMA), and progressive bulbar palsy (PBP). In one embodiment, the term ALS refers to the broader category of MND, and includes but is not limited to, PLS, HSP, pseudobulbar palsy, Mills' syndrome, monomelic amyotrophy, PPS, MMND, PMA, SMA, SBMA, and PBP.

[0072] ALS can share common mechanisms with other “neurodegenerative diseases”, “neuromuscular diseases” and “TDP-43 proteinopathies”, including frontotemporal lobar degeneration (FTLD) and frontotemporal dementia (FTD), Alzheimer's disease, Parkinson's disease, and retinal degeneration diseases such as age-related macular degeneration (AMD). In one embodiment, the term ALS refers to the broader category of neurodegenerative and neuromuscular diseases. In another embodiment, the term ALS refers to the broader category of diseases involving TDP-43 proteinopathy.

[0073] “Proteinopathies” refer to a class of diseases that can result from, in part or in whole, abnormal protein function or protein aggregates, which are caused by structural or configurational abnormalities, modifications to the protein sequence (e.g., post-translational modifications) or localization, leading to aggregation of those proteins as a consequence. Such abnormal protein function or aggregates can interrupt or alter normal cellular, tissue, or organ function.

[0074] “TDP-43 proteinopathies” refers to diseases wherein a sub-population of patients can exhibit an increase in levels of TDP-43 aggregates in the cytoplasm. Examples of which include but are not limited to, ALS, Alzheimer's disease, argyrophilic grain disease, vascular dementia, frontotemporal dementia (FTD, FTD-TDP-43, and FTD-tau) and the greater group of frontotemporal lobar degeneration (FTLD), semantic dementia, dementia with Lewy bodies, polyglutamine diseases, Huntington's disease, spinocerebellar ataxia, inclusion body myopathy, inclusion body myositis, hippocampal sclerosis, parkinsonism, Parkinson's disease (PD), Perry syndrome, ALS-parkinsonism dementia complex of Guam, primary lateral sclerosis (PLS), hereditary spastic paraplegia (HSP), pseudobulbar palsy, Mills' syndrome, monomelic amyotrophy, post-polio syndrome (PPS), madras motor neuron disease (MMND), progressive muscular atrophy (PMA), spinal muscular atrophy (SMA), spinal and bulbar muscular atrophy (SBMA), progressive bulbar palsy (PBP), retinal degeneration diseases such as age-related macular degeneration (AMD), retinitis pigmentosa (RP), and glaucoma. TDP-43 proteinopathies are further described in Gendron and Josephs (Gendron and Josephs, Neuropathol. Appl. Neurobiol. 36:97-112 (2010)), Lagier-Tourenne et al. (Lagier-Tourenne et al., Hum. Mol. Gen. 19(1): R46-R64 (2010)), and Matsukawa et al. (Matsukawa et al., Journal of Biological Chemistry, 291(45): 23464-23476 (2016)), the disclosures of which, together with references cited therein, are incorporated herein in their entirety.

[0075] “Retinal degeneration diseases” refer to a class of diseases that can result from, in part or in whole, damage to photoreceptor cells of the retina, resulting in a continuous decline in vision. The term “retinal degeneration diseases” can include diseases such as, age-related macular degeneration (AMD), retinitis pigmentosa (RP), glaucoma or vision loss associated with photoreceptor degeneration.

[0076] “Oxidative stress” refers to a condition where there is an excess production of reactive oxygen species (ROS) relative to antioxidants. The term “oxidative stress” includes diseases such as attention deficit hyperactivity disorder (ADHD), autism, Asperger syndrome, atherosclerosis, cancer, depression, myocardial infarction, cardiovascular disease, chronic fatigue syndrome, diabetes, fragile X syndrome, neurodegenerative diseases such as ALS, Huntington's disease, Parkinson's disease, Alzheimer's disease and multiple sclerosis; ophthalmological diseases such as glaucoma, cataract formation and macular degeneration; as well as liver injury, osteoporosis, autoimmune diseases, inflammatory diseases, stroke and sickle cell disease.

[0077] “Anemia” refers to a condition where there are insufficient healthy red blood cells to transport oxygen to the body's tissues, resulting in symptoms such as fatigue, weakness, and dizziness. Anemia can be an acute or chronic condition. There are different potential causes of anemia, including iron deficiency, vitamin deficiency, inflammation, aplastic anemia, bone marrow disease, hemolytic anemia or sickle cell anemia.

[0078] “Ischemic diseases” refer to vascular diseases involving an interruption or reduction in the supply of arterial blood to a tissue, or organ, resulting in tissue or organ damage. The term “ischemic disease” includes cardiovascular diseases such as cardiac ischemia, myocardial ischemia, ischemic cardiomyopathy, coronary artery disease, or myocardial infarction. The term “ischemic disease” also includes ischemic colitis, mesenteric ischemia, brain ischemia, stroke, renal ischemia, limb ischemia, peripheral vascular disease or cutaneous ischemia.

[0079] “Inflammatory diseases” refer to diseases that are characterized by inflammation. The term “inflammatory disease” includes but is not limited to, allergy, asthma, atherosclerosis, autoimmune diseases, coeliac disease, glomerulonephritis, hepatitis, inflammatory bowel disease, non-alcoholic steatohepatitis (NASH), psoriasis, renal fibrosis, reperfusion injury, rheumatoid arthritis, transplant rejection, tubular ischemia-reperfusion damage or vascular inflammation. The term “inflammatory disease” also refers to neuroinflammatory diseases that are characterized by neurological damage caused by immune responses, including but not limited to, neurodegenerative diseases such as Alzheimer's disease, Parkinson's disease, amyotrophic lateral sclerosis, multiple sclerosis, or other TDP-43 proteinopathies.

[0080] “Cancer” refers to an abnormal growth of cells which tend to proliferate in an uncontrolled way and, in some cases, to metastasize. The term “cancer” or “cancers” include but are not limited to oral, salivary, laryngeal, esophangeal, head and neck, lung, gastric, gallbladder, pancreatic, urothelial, bladder, renal, cervical, ovarian, prostate, breast or colorectal cancer; as well as fibrofolliculomas, clear cell renal cell carcinoma, multilocular clear cell renal carcinoma, chromophobe renal cell carcinoma, renal oncocytic hybrid carcinoma, uterine corpus endometrioid cancer, interdigitating dendritic cell sarcoma, hemangioblastomas (slow-growing tumors of the central nervous system), pancreatic neuroendocrine tumors, pheochromocytomas (noncancerous tumors of the adrenal glands), endolymphatic sac tumors, kidney cysts, or lung cysts.

[0081] “Ameliorating” is the lessening of severity of a disease, as measured by at least one indicator of that disease. Indicators can be symptoms of that disease, or a marker associated with the disease and can be objectively or subjectively evaluated. In certain embodiments, to “ameliorate” can mean to slow, halt, or reverse the progression of a disease.

[0082] A “dose” is a specified unit of a pharmaceutical composition that is provided for administration. In some embodiments, dose can refer to a specified amount of a pharmaceutical composition that is administered over a period of time. The dose can refer to the total amount of the pharmaceutical composition administered, or the amount of pharmaceutical composition administered per unit of time.

Modulation of FNIP1 and/or FNIP2

[0083] In certain embodiments, provided herein are compositions, systems and methods for modulating the expression or activity of FNIP1 and/or FNIP2 in a cell, an animal, or human subject. In certain embodiments, provided herein are compositions, systems and methods for decreasing or inhibiting the expression or activity of FNIP1 and/or FNIP2 in a cell, an animal, or human subject, in order to treat, prevent, or ameliorate a disease, particularly neuromuscular or neurodegenerative diseases, such as for example, ALS, FTLD, Alzheimer's disease, retinal degeneration diseases such as age-related macular degeneration (AMD), and other TDP-43 proteinopathies; as well as oxidative stress, obesity, anemia or ischemic diseases, such as cardiovascular disease, myocardial ischemia and peripheral vascular disease. In other embodiments, also provided herein are compositions, systems, and methods for modulating, in particular increasing or upregulating, the expression or activity of FNIP1 and/or FNIP2 in a cell, animal or human subject. Such compositions, systems, and methods can be used to prevent, ameliorate, or treat diseases, particularly inflammatory diseases, von Hippel-Lindau (VHL) disease, Birt-Hogg-Dube (BHD) syndrome, spontaneous pneumothorax, B cell deficiency, cardiomyopathy, as well as cancers described herein.

[0084] FNIP1 encodes for a protein named folliculin interacting protein 1, which is also represented herein as FNIP1. FNIP1 is also known as KIAA1961. FNIP2 encodes for a protein named folliculin interacting protein 2, which is also represented herein as FNIP2. FNIP2 is also known as FNIP1-like protein, FNIPL, MAPO1, O6-methylguanine-induced apoptosis 1 protein, or KIAA1450. The FNIP1 or FNIP2 protein or polypeptide, referenced herein, includes any polymorphs and/or isoforms of the FNIP1 or FNIP2 protein respectively, for example, different protein products obtained from the expression of different nucleic acids encoding FNIP1 or FNIP2, such as described in SEQ ID NOs: 1-15. FNIP1 and/or FNIP2, as used herein, also refers to FNIP1 and/or FNIP2 genes or transcripts, such as described in SEQ ID NOs: 1-15. Furthermore, FNIP1 and/or FNIP2, as used herein, also refers to FNIP1 and/or FNIP2 genes or transcripts harboring one or more mutations, or FNIP1 and/or FNIP2 proteins obtained from the expression of such mutant genes or transcripts.

[0085] FNIP1 and FNIP2 are paralogs that can each dimerize with their binding partner folliculin (also known as FLCN) to form a FNIP1-FLCN complex or FNIP2-FLCN complex respectively. FNIP1, FNIP2 and FLCN are DENN (differentially expressed in normal and neoplastic cells) proteins comprising an N-terminal longin domain and a C-terminal DENN domain. The FNIP1-FLCN and FNIP2-FLCN complexes are formed by the interaction between the longin domains and interaction between the DENN domains of the respective members of the complex (Lawrence et al., Science 366: 971-977 (2019); Shen et al., Cell 179: 1-11 (2019)). The FNIP1-FLCN and/or FNIP2-FLCN complexes play important roles in regulating several pathways such as the Rag-mediated nutrient sensing pathway, the VHL-HIF-VEGF pathway, the TGF-β pathway, the autophagy pathway, the cell cycle, and RhoA signaling (Hasumi et al., PNAS 112(13): E1624-E1631 (2015)).

[0086] FNIP1, FNIP2 and FLCN are expressed in most tissues, for example, the brain, the skin and its appendages, the lungs, and the kidney, etc. One function of the FNIP1-FLCN complex and/or FNIP2-FLCN complex is as a tumor suppressor. Loss-of-function of FNIP1 and/or FNIP2, as well as mutations in FNIP1 or FNIP2, have been associated with cancers, such as for example, fibrofolliculomas, kidney tumors, clear cell renal cell carcinoma, multilocular clear cell renal carcinoma, chromophobe renal cell carcinoma, renal oncocytic hybrid carcinoma, bladder cancer, uterine corpus endometrioid cancer, interdigitating dendritic cell sarcoma, hemangioblastomas, pancreatic neuroendocrine tumors, pheochromocytomas, endolymphatic sac tumors, kidney cysts and lung cysts. Inactivation of both FNIP1 and FNIP2 in the kidneys of mice results in enlarged polycystic kidneys and/or kidney cancer, which is similar to the phenotypes observed with FLCN-deficient kidneys. Furthermore, expression of one allele of either FNIP1 or FNIP2 in FNIP1/FNIP2 knockout mice can rescue the phenotype, thus suggesting that FNIP1 and FNIP2 are functionally redundant. Hasumi et al. (Hasumi et al., PNAS 112(13): E1624-E1631 (2015)) describes the roles of FNIP1 and FNIP2 in normal cells and in disease such as cancers, the disclosures of which, along with its references, are incorporated herein in its entirety.

[0087] Similarly, loss-of-function mutations in FLCN have been linked to kidney, lung and skin tumors, pneumothorax, and Birt-Hogg-Dube (BHD) syndrome. Schmidt et al. (Schmidt et al., Gene 640: 28-42 (2018)) describes the structure of FLCN, its normal roles in the cell and associated pathways, as well as its roles in diseases such as BHD, fibrofolliculomas, lung cysts, spontaneous pneumothorax and kidney tumors, the disclosures of which, along with its references, are incorporated herein in its entirety. Previously, Bastola et al. reported that VHL is a positive regulator of FLCN mRNA levels either by transcriptional induction, or stabilization of FLCN mRNA by repression of miRNAs that inhibit FLCN mRNA, or a combination of both (Bastola et al., PLoS ONE 8(7): e70030 (2013)). Loss-of-function mutations in VHL have been linked to von Hippel-Lindau (VHL) disease, hemangioblastomas (slow-growing tumors of the central nervous system), kidney cysts, clear cell renal cell carcinoma, pancreatic neuroendocrine tumors, pheochromocytomas (noncancerous tumors of the adrenal glands) and endolymphatic sac tumors. Gossage et al. (Gossage et al., Nature Reviews Cancer 15: 55-64 (2015)) describes the structure of VHL, its normal roles in the cell and associated pathways, as well as its roles in VHL disease and cancers, such as hemangioblastomas, kidney cysts, clear cell renal cell carcinoma, pancreatic neuroendocrine tumors, pheochromocytomas and endolymphatic sac tumors, the disclosures of which, along with its references, are incorporated herein in its entirety. Therefore, provided herein are compositions, systems and methods for increasing the expression or activity of FNIP1 and/or FNIP2 in a cell, an animal, or human subject, in order to rescue loss-of-function in the FNIP, FLCN or VHL pathways, thereby treating, preventing or ameliorating a disease, such as von Hippel-Lindau (VHL) disease, Birt-Hogg-Dube (BHD) syndrome, spontaneous pneumothorax, as well as cancers such as fibrofolliculomas, kidney tumors, clear cell renal cell carcinoma, multilocular clear cell renal carcinoma, chromophobe renal cell carcinoma, renal oncocytic hybrid carcinoma, bladder cancer, uterine corpus endometrioid cancer, interdigitating dendritic cell sarcoma, hemangioblastomas, pancreatic neuroendocrine tumors, pheochromocytomas, endolymphatic sac tumors, kidney cysts, lung cysts.

[0088] Furthermore, loss-of-function mutations in FNIP1 in mice leads to B cell deficiency and the development of cardiomyopathy, which is similar to the effects of upregulating AMPK in mice and humans (Siggs et al., PNAS 113(26): E3706-E3715 (2016)). In addition, loss of FNIP1 in mice is associated with increased expression of inflammatory markers (Centini et al., PLoS One 13(6): e0197973 (2018)). Therefore, provided herein are compositions, systems and methods for increasing the expression or activity of FNIP1 and/or FNIP2 in a cell, an animal, or human subject, in order to treat, prevent or ameliorate a disease, such as inflammatory diseases, B cell deficiency and cardiomyopathy.

[0089] Thus, in certain embodiments, provided herein are modulators and their methods of use to increase the expression or activity of FNIP1 and/or FNIP2. In one embodiment, the modulator targets a nucleic acid encoding FNIP1 and/or FNIP2 and increases its transcription. In one embodiment, the modulator targets a nucleic acid encoding FNIP1 and/or FNIP2 and stabilizes it. In one embodiment, the modulator targets a nucleic acid encoding FNIP1 and/or FNIP2 and increases its translation. In some embodiments, the upregulation of FNIP1 and/or FNIP2 expression or activity can lead to an increase in FLCN expression or activity. In one embodiment, the modulator targets FNIP1 and/or FNIP2 protein and promotes its interaction with the FLCN protein. In one embodiment, the modulator targets the longin domain of FNIP1 and/or FNIP2 protein and promotes its interaction with the longin domain of FLCN. In one embodiment, the modulator targets the DENN domain of FNIP1 and/or FNIP2 protein and promotes its interaction with the DENN domain of FLCN. In one embodiment, the modulator targets the FNIP1 and/or FNIP2 protein and increases its activity in positively regulating the expression or activity of FLCN. Thus, in some embodiments, the increase in FNIP1 and/or FNIP2 expression or activity can be used to treat, prevent or ameliorate diseases such as inflammatory diseases, von Hippel-Lindau (VHL) disease, Birt-Hogg-Dube (BHD) syndrome, B cell deficiency, cardiomyopathy, spontaneous pneumothorax, as well as cancers such as fibrofolliculomas and kidney tumors. In certain embodiments, the modulators provided herein that can increase the expression or activity of FNIP1 and/or FNIP2 include, but are not limited to antisense modulators, nucleic acid vectors, oligonucleotide modulators, peptide modulators, antibody modulators, and small molecule modulators. In some embodiments, the modulators provided herein can be used as prophylaxis to prevent diseases such as inflammatory diseases, von Hippel-Lindau (VHL) disease, Birt-Hogg-Dube (BHD) syndrome, B cell deficiency, cardiomyopathy, spontaneous pneumothorax, as well as cancers. In other embodiments, the modulators provided herein can be used as therapeutics to treat or ameliorate the symptoms of diseases such as inflammatory diseases, von Hippel-Lindau (VHL) disease, Birt-Hogg-Dube (BHD) syndrome, B cell deficiency, cardiomyopathy, spontaneous pneumothorax, as well as cancers such as fibrofolliculomas and kidney tumors.

[0090] The present invention is, in part, related to the novel discovery that instead of upregulating FNIP1 and/or FNIP2, which can be effective to treat diseases such as inflammatory diseases, von Hippel-Lindau (VHL) disease, Birt-Hogg-Dube (BHD) syndrome, B cell deficiency, cardiomyopathy, spontaneous pneumothorax, as well as cancers such as fibrofolliculomas and kidney tumors, counterintuitively, reducing or inhibiting the expression or activity of FNIP1 and/or FNIP2 can be used to treat a unique set of diseases, particularly neuromuscular or neurodegenerative diseases, such as for example, ALS, FTLD, Alzheimer's disease, retinal degeneration diseases such as age-related macular degeneration (AIMD), and other TDP-43 proteinopathies; as well as oxidative stress, obesity, anemia or ischemic diseases, such as cardiovascular disease, myocardial ischemia and peripheral vascular disease.

[0091] Previously, FLCN has been shown to interact with TDP-43 in human embryonic kidney (HEK293) cells and to mediate the shuttling of TDP-43 from the nucleus into the cytoplasm (Xia et al., Human Molecular Genetics, 25(1): 83-96 (2016)). Given that the experiments in Xia et al. were performed in kidney cells, and that cellular function and disease mechanisms are typically unique across different tissues or cell types, there remains a need for investigations into the relationship of FLCN to cytoplasmic TDP-43 accumulation in neuronal cell types. Experiments have been performed by the inventors in disease-relevant neuronal cell types (e.g. motor neuron cells), which have led to the novel discovery that inhibiting or reducing the expression or activity of FLCN in neuronal cell types, which are implicated in neuromuscular or neurodegenerative diseases such as ALS and other TDP-43 proteinopathies, lead to a decrease in cytoplasmic TDP-43 aggregates (see Example 5) and an increase in cell survival (see Example 4). Given that FNIP1 and/or FNIP2 positively regulates the expression or activities of FLCN, therefore, inhibiting or reducing the expression or activity of FNIP1 and/or FNIP2 can lead to a decrease in FLCN expression or activity, which can lead to a decrease in the shuttling of TDP-43 from the nucleus into the cytoplasm, thereby leading to a decrease in cytoplasmic TDP-43 aggregates and an increase in cell survival. Thus, in certain embodiments, reducing or inhibiting the expression or activity of FNIP1 and/or FNIP2 can be used to treat, prevent, or ameliorate neuromuscular or neurodegenerative diseases, such as for example, ALS, FTLD, Alzheimer's disease, retinal degeneration diseases such as age-related macular degeneration (AIMD), and other TDP-43 proteinopathies.

[0092] Further support for this discovery can also be found in studies showing that loss of FNIP1-FLCN or FNIP2-FLCN in BHD patients lead to the constitutive activation of AMPK, which results in PGC-1α mediated mitochondrial biogenesis, induction of HIF-1α transcriptional activity and increased transcription of VEGF (Preston et al., Oncogene 30: 1159-1173 (2011); Yan et al., J Clin Invest. 124(6): 2640-2650 (2014)). While increased expression or activity of VEGF and/or HIF-1α contributes to tumorigenesis, counterintuitively, these changes can be beneficial to treat, prevent, or ameliorate neuromuscular or neurodegenerative diseases, such as for example, ALS, FTLD, Alzheimer's disease, retinal degeneration diseases such as age-related macular degeneration (AMD), and other TDP-43 proteinopathies. VEGF plays important roles in neurogenesis, neuronal survival, neuronal migration, and axon guidance. Strategies to increase the expression or activity of VEGF or HIF-1α have been used in exploratory clinical studies, and have shown promising results to treat ALS and other neurological disorders (Pronto-Laborinho et al., BioMedResearch International, Article ID 947513 (2014)).

[0093] In certain embodiments, reducing or inhibiting the expression or activity of FNIP1 and/or FNIP2 stimulates mitochondrial biogenesis and angiogenesis via the activation of the VEGF and HIF-1α pathways, which can be used to treat, prevent or ameliorate anemia or ischemic diseases, such as cardiovascular disease, myocardial ischemia and peripheral vascular disease. In addition, FLCN-deficient mice exhibit reduced inflammation when subject to a NASH-inducing diet, while FLCN-deficient nematodes develop increased resistance to oxidative stress and pathogens (Paquette et al., bioRxiv DOI: 10.1101/2020.09.10.291617 (2020)). Thus, in certain embodiments, reducing or inhibiting the expression or activity of FNIP1 and/or FNIP2, which results in a decrease in expression or activity of FLCN, can be used to treat, prevent or ameliorate inflammatory diseases and oxidative stress. Furthermore, knockout of FLCN in mice adipocytes results in resistance to obesity induced by a high-fat diet (Paquette et al., bioRxiv DOI: 10.1101/2020.09.10.291617 (2020)). Thus, in certain embodiments, reducing or inhibiting the expression or activity of FNIP1 and/or FNIP2, which results in a decrease in expression or activity of FLCN, can be used to treat, prevent or ameliorate obesity.

[0094] Thus, in certain embodiments, provided herein are modulators and their methods of use to reduce or inhibit the expression or activity of FNIP1 and/or FNIP2. In one embodiment, the modulator targets a nucleic acid encoding FNIP1 and/or FNIP2 and inhibits its transcription. In one embodiment, the modulator targets a nucleic acid encoding FNIP1 and/or FNIP2 and degrades or destabilizes it. In one embodiment, the modulator targets a nucleic acid encoding FNIP1 and/or FNIP2 and inhibits its translation. In some embodiments, the inhibition of FNIP1 and/or FNIP2 expression or activity can lead to a decrease in FLCN expression or activity. In one embodiment, the modulator targets FNIP1 and/or FNIP2 protein and blocks its interaction with the FLCN protein. In one embodiment, the modulator targets the longin domain of FNIP1 and/or FNIP2 protein and blocks its interaction with the longin domain of FLCN. In one embodiment, the modulator targets the DENN domain of FNIP1 and/or FNIP2 protein and blocks its interaction with the DENN domain of FLCN. In one embodiment, the modulator targets the FNIP1 and/or FNIP2 protein and inhibits its activity in positively regulating the expression or activity of FLCN. In yet another embodiment, the modulator targets the FNIP1 and/or FNIP2 protein and degrades or destabilizes it, resulting in a decrease in expression or activity of FLCN. In some embodiments, the inhibition of FNIP1 and/or FNIP2 expression or activity can lead to either a decrease in the level of pathological TDP-43 aggregates in the cytoplasm, or an increase in levels of functional TDP-43 in the nucleus, or a combination thereof, in order to treat, prevent or ameliorate neurodegenerative or neuromuscular diseases, such as for example, ALS or other TDP-43 proteinopathies. In certain embodiments, provided herein are modulators that disrupt the interaction between the FNIP1-FLCN complex and/or the FNIP2-FLCN complex and TDP-43. In some embodiments, the modulators target the RRM2 domain of TDP-43, thereby blocking its interaction with the FNIP1-FLCN complex and/or FNIP2-FLCN complex. In other embodiments, the modulators target the region of the FNIP1-FLCN complex and/or FNIP2-FLCN complex that interacts with the RRM2 domain of TDP-43, thereby blocking its interaction with TDP-43. Such modulators that specifically disrupt the interaction between the FNIP1-FLCN complex and/or FNIP2-FLCN complex and TDP-43 can lead to beneficial outcomes such as either a decrease in the level of TDP-43 aggregates in the cytoplasm, or an increase in levels of functional TDP-43 in the nucleus, or a combination thereof, while allowing for the non-targeted domains in FNIP1, FNIP2, FLCN, or TDP-43, to perform their normal functions, thus reducing undesired side effects. In some embodiments, provided herein are modulators that inhibit the expression or activity of FNIP1 and/or FNIP2, which can lead to an increase in HIF-1α and/or VEGF levels and/or activity. In some embodiments, an increase in HIF-1α and/or VEGF levels can be used to treat, prevent or ameliorate neurodegenerative or neuromuscular diseases, such as ALS or other TDP-43 proteinopathies. In other embodiments, an increase in HIF-1α and/or VEGF levels can be used to treat, prevent or ameliorate anemia or ischemic diseases, such as cardiovascular disease, myocardial ischemia and peripheral vascular disease. In certain embodiments, the modulators provided herein that can decrease the expression or activity of FNIP1 and/or FNIP2 include, but are not limited to antisense modulators, nucleic acid vectors, oligonucleotide modulators, peptide modulators, antibody modulators, and small molecule modulators. In some embodiments, the modulators provided herein can be used as prophylaxis to prevent neuromuscular or neurodegenerative diseases, such as for example, ALS, other TDP-43 proteinopathies, as well as oxidative stress, obesity, anemia or ischemic diseases. In other embodiments, the modulators provided herein can be used as therapeutics to treat or ameliorate the symptoms of neuromuscular or neurodegenerative diseases, such as for example, ALS, other TDP-43 proteinopathies, as well as oxidative stress, obesity, anemia or ischemic diseases. In a preferred embodiment, the modulators provided herein can be used as prophylaxis to prevent ALS. In another preferred embodiment, the modulators provided herein can be used as therapeutics to treat or ameliorate the symptoms of ALS.

Modulation of FNIP1 and/or FNIP2 Via Associated Genes or Pathways

[0095] In certain embodiments, the inhibition or downregulation of FNIP1 and/or FNIP2 mRNA or FNIP1 and/or FNIP2 protein can be achieved by targeting FNIP1 and/or FNIP2-associated genes or pathways. Such decrease in expression or activity of FNIP1 and/or FNIP2 can be useful to treat, prevent or ameliorate diseases, particularly neuromuscular or neurodegenerative diseases, such as for example, ALS, other TDP-43 proteinopathies, as well as oxidative stress, obesity, anemia or ischemic diseases. In certain embodiments, provided herein are modulators that reduce or inhibit the expression, activity or signaling of FNIP1 and/or FNIP2 by targeting and inhibiting at least one gene or pathway that positively regulates or increases the expression, activity or signaling of FNIP1 and/or FNIP2. In another embodiment, provided herein are modulators that reduce or inhibit the expression of FNIP1 and/or FNIP2 by targeting and increasing the expression or activity of at least one gene or pathway that negatively regulates or inhibits the expression of FNIP1 and/or FNIP2. In one embodiment, provided herein are modulators that reduce or inhibit the activity of FNIP1 and/or FNIP2, by targeting and inhibiting another gene or pathway that is responsible for positively regulating the activity of FNIP1 and/or FNIP2. In yet another embodiment, provided herein are modulators that reduce or inhibit the activity of FNIP1 and/or FNIP2 by increasing the expression or activity of at least one gene or pathway that is responsible for negatively regulating the activity of FNIP1 and/or FNIP2.

[0096] In certain embodiments, the increase in expression or activity of FNIP1 and/or FNIP2 mRNA or FNIP1 and/or FNIP2 protein can be achieved by targeting FNIP1 and/or FNIP2-associated genes or pathways. Such increase in expression or activity of FNIP1 and/or FNIP2 can be useful to treat, prevent or ameliorate diseases such as inflammatory diseases, von Hippel-Lindau (VHL) disease, Birt-Hogg-Dube (BHD) syndrome, spontaneous pneumothorax, B cell deficiency, cardiomyopathy, as well as cancers described herein. In certain embodiments, provided herein are modulators that increase the expression, activity or signaling of FNIP1 and/or FNIP2 by targeting and increasing the expression or activity of at least one gene or pathway that positively regulates or increases the expression, activity or signaling of FNIP1 and/or FNIP2. In another embodiment, provided herein are modulators that increase the expression of FNIP1 and/or FNIP2 by targeting and decreasing the expression or activity of at least one gene or pathway that negatively regulates or inhibits the expression of FNIP1 and/or FNIP2. In one embodiment, provided herein are modulators that increase the activity of FNIP1 and/or FNIP2, by targeting and increasing the expression or activity of another gene or pathway that is responsible for positively regulating the activity of FNIP1 and/or FNIP2. In yet another embodiment, provided herein are modulators that increase the activity of FNIP1 and/or FNIP2 by decreasing the expression or activity of at least one gene or pathway that is responsible for negatively regulating the activity of FNIP1 and/or FNIP2.

[0097] In yet other embodiments, provided herein are modulators that target FNIP1 and/or FNIP2 to affect the nucleocytoplasmic distribution of FLCN. In a preferred embodiment, provided herein are modulators that enhance the nuclear distribution of FLCN and reduce its localization to the cytoplasm. When FLCN is expressed on its own, it is mostly localized to the nucleus. However, when FNIP1 or FNIP2 is co-expressed with FLCN, FNIP1-FLCN or FNIP2-FLCN complexes are observed in the cytoplasm respectively. The regulation of FLCN nucleocytoplasmic shuttling by FNIP1 and FNIP2 is described in Takagi et al. (Takagi et al., Oncogene, 27: 5339-5347 (2008)), Baba et al. (Baba et al., PNAS, 103(42): 15552-15557 (2006)) and Hasumi et al. (Hasumi et al., Gene, 31: 415(1-2), 60-67 (2008)), the disclosures of which, along with their references, are incorporated herein in its entirety. In certain embodiments, provided herein are modulators that targets, removes or interferes with the longin or DENN domains of FNIP1 and/or FNIP2, in order to reduce or prevent the cytoplasmic shuttling of FLCN, thereby leading to either a decrease in pathological TDP-43 aggregates in the cytoplasm, or an increase in levels of functional TDP-43 in the nucleus, or a combination thereof. Furthermore, the activity of FNIP1 and/or FNIP2 in positively regulating the expression or activity of FLCN is regulated by post-translational modifications to FNIP1 and/or FNIP2. In particular, the phosphorylation of Ser938, Ser939, Ser941, Ser946, and/or Ser948 of FNIP1 and/or FNIP2 by casein kinase 2 (CK2) promotes its activity of positively regulating the expression or activity of FLCN. Conversely, protein phosphatase 5 (PP5) dephosphorylates FNIP1 and/or FNIP2, thereby promoting its ubiquitination and proteasomal degradation. Therefore, in some embodiments, provided herein are modulators that decrease the activity of CK2, and/or increase the activity of PP5, in order to decrease the expression or activity of FNIP1 and/or FNIP2. In other embodiments, provided herein are modulators that increase the activity of CK2, and/or decrease the activity of PP5, in order to increase the expression or activity of FNIP1 and/or FNIP2.

### Antisense Modulators

[0098] In one embodiment, the modulator used to modulate the expression or activity of FNIP1 and/or FNIP2, is an antisense modulator. In one embodiment, the antisense modulator inhibits or decreases the expression or activity of a targeted nucleic acid or polypeptide, such as FNIP1 and/or FNIP2. In one embodiment, the antisense modulator is an antisense oligonucleotide (ASO). ASO in various embodiments can be in any format well known to a person skilled in the art. ASOs comprise an oligonucleotide sequence that is complementary to the coding sequence, otherwise known as the sense strand, of a targeted gene. When a targeted gene is transcribed into pre-mRNA or mRNA, the ASO binds to the mRNA, forming a double-stranded RNA molecule or an RNA/DNA complex. The double-stranded nature of the resulting RNA molecule or RNA/DNA complex prevents effective translation of the target mRNA, thereby reducing or preventing expression of the resulting polypeptide. Furthermore, double-stranded RNA or RNA/DNA complexes are subject to degradation and digestion by a collection of enzymes known as endonucleases, such as RNase H, thereby decreasing or inhibiting the expression of the resulting polypeptide. In certain embodiments, the ASO can effect a change in splicing patterns of the mRNA such that one exon is exchanged for another (i.e., splice-switching). If exons that are important for the expression or activity of the resulting polypeptide are swapped for exons that lack those functions, that will result in a decrease in expression or activity of the resulting polypeptide. In other embodiments, the ASO can effect a change in splicing patterns of the mRNA such that one or more exons, or portion thereof, is removed (i.e., exon-skipping). In one embodiment, exon skipping results in a shift in the reading frame during translation, leading to premature stop codons and a truncated protein that is degraded by nonsense-mediated decay (NMD), thus decreasing the expression of the resulting polypeptide. In another embodiment, the ASO can effect a change in splicing patterns of the mRNA such that one or more introns, or portion thereof, is retained (i.e., intron retention), which can lead to a decrease in protein expression or activity. In one embodiment, the ASO inhibits the expression of a targeted polypeptide or nucleotide sequence in part or in its entirety. In another embodiment, the ASO inhibits an enzyme that affects the function of a targeted polypeptide. In yet another embodiment, the ASO inhibits the activity of an RNA molecule. In another embodiment, the ASO modulator reduces the level of an RNA molecule, such as a noncoding RNA molecule, thereby affecting the expression of a targeted nucleic acid or polypeptide. In yet other embodiments, the ASO can modulate the stability and rate of degradation of the mRNA. Rinaldi & Wood (2018) (Rinaldi, C. and Wood M. J. A. Nature Review Genetics 14:19-21 (2018)) describe in more detail the functions and uses of ASO and chemical modifications for ASOs to promote effectiveness and stability in the therapeutic context. The Rinaldi & Wood (2018) reference, including all references cited therein, are incorporated herein in its entirety. In certain embodiments, methods and compositions for the delivery of antisense modulators into a cell, an animal, or a human subject described herein can be utilized to decrease the expression or activity of FNIP1 and/or FNIP2.

[0099] In other embodiments, antisense modulators described herein can increase or upregulate the expression or activity of nucleic acids and/or polypeptides of a targeted gene, such as FNIP1 and/or FNIP2. In one embodiment, those antisense modulators comprise antisense oligonucleotides (ASOs) and can include the characteristics, lengths, modifications, complexes, and conjugates described herein. In one embodiment, the antisense modulator targets and decreases the levels of a natural antisense transcript (NAT) that is responsible for downregulating a targeted gene, thereby increasing the expression of the targeted gene. In one embodiment, the antisense modulator targets and blocks a miRNA binding site present on the mRNA transcript of a targeted gene that is responsible for downregulating the targeted gene, thereby increasing the expression of the targeted gene. In one embodiment, the antisense modulator targets and decreases the levels of a miRNA that is responsible for downregulating the expression of a targeted gene, thereby increasing the expression of the targeted gene. In one embodiment, the antisense modulator targets a destabilizing motif present on the mRNA transcript of a targeted gene, thereby increasing the stability of the mRNA and leading to increased expression of the targeted gene. In one embodiment, the antisense modulator targets a polyadenylation signal motif on the mRNA transcript of a targeted gene, thereby increasing the stability of the mRNA and leading to increased expression of the targeted gene. In one embodiment, the antisense modulator targets an upstream open reading frame, thereby leading to increased expression of the targeted gene. In certain embodiments, methods and compositions for the delivery of antisense modulators into a cell, an animal, or a human subject described herein can be utilized to increase or upregulate the expression or activity of FNIP1 and/or FNIP2.

[0100] ASOs can be produced by any number of methods known to a person who is skilled in the art (see below for examples of some specific methods).

### RNAi Modulators

[0101] In one embodiment, the modulator can be a therapeutic oligonucleotide used in the RNAi process. The therapeutic RNAi oligonucleotide can include miRNA, siRNA, or shRNA.

[0102] The oligonucleotides used in the RNAi process can be in any form well known to a person skilled in the art. The RNAi process involving siRNA/shRNA comprises several steps. First, a double-stranded oligonucleotide is introduced into the cell either exogenously or through the introduction of a viral vector that transcribes it. Second, the double-stranded oligonucleotide is cleaved by the ribonuclease protein Dicer into siRNA, which are short oligonucleotide fragments of around 20-25 base pairs. This step is not needed if synthetic siRNAs, which resemble the products of Dicer, are used. Third, the siRNA is separated by RISC into single-stranded oligonucleotide fragments, comprising the sense and antisense strands to a target RNA, and integrated into the RISC to form a RISC-siRNA complex. Fourth, the RISC-siRNA complex containing the antisense strand hybridizes to a target RNA that is complementary to it and cleaves the target RNA, thereby inhibiting translation of the target RNA into a polypeptide. In some embodiments, the oligonucleotides used in RNAi comprises preformed double-stranded (duplex) RNA, and which are preferably 19-29 nucleotides in length. In one embodiment, the oligonucleotide used in RNAi comprise a single-stranded, short hairpin RNA (shRNA), which consists of two complementary RNA sequences that are preferably 19-22 nucleotides each in length, and which are linked by a short loop of 4-11 nucleotides. The shRNA can be encoded in the form of DNA and delivered into cells via a nucleic acid vector, wherein it is transcribed to form the shRNA. miRNA are non-coding RNA sequences found endogenously that use the same RISC pathway to target and inhibit other RNA molecules. One difference between miRNA and siRNA is that miRNAs can operate by imperfect base pairing and typically affects multiple target RNAs, whereas siRNAs usually operate by perfect base pairing leading to specific knockdown of a target RNA. miRNAs are transcribed in the nucleus to give primary miRNA (pri-miRNA), which consists of a double-stranded stem-loop structure. Pri-miRNA is cleaved by a microprocessor complex to form precursor miRNA (pre-miRNA), which is 70-100 nucleotides in length. Pre-miRNA is transported from the nucleus to the cytoplasm, where it is processed by Dicer into a miRNA duplex of 18-25 nucleotides, which is incorporated into the RISC complex. The RISC-miRNA complex containing the antisense strand hybridizes to a target RNA that is complementary to it, resulting in translational repression, degradation and/or cleavage of the target RNA. RNAi processes and their therapeutic applications are described in more detail by Aagaard and Rossi (Aagaard L and Rossi JJ, Advanced Drug Delivery Reviews 59:75-86 (2007)), and Lam et al. (Lam et al., Molecular Therapy, Nucleic Acids 4, e252 (2015)), the disclosures of which, along with their references, are incorporated herein in their entirety.

[0103] In some embodiments, the RNAi oligonucleotide modulator inhibits or decreases the expression or activity of a targeted nucleic acid or polypeptide, such as FNIP1 and/or FNIP2. In other embodiments, the RNAi oligonucleotide modulator increases the expression or activity of a targeted nucleic acid or polypeptide, such as FNIP1 and/or FNIP2. In one embodiment, the RNAi oligonucleotide modulator inhibits or decreases the expression of a targeted polypeptide in part or in its entirety. In another embodiment, the RNAi oligonucleotide modulator inhibits a regulator that affects the expression or activity of a targeted polypeptide or nucleotide sequence. In another embodiment, the RNAi oligonucleotide modulator inhibits another nucleic acid, such as a noncoding RNA, which affects the expression or activity of the target polypeptide or nucleic acid sequence.

[0104] RNAi oligonucleotides can be produced by any number of methods known to a person who is skilled in the art (see below for specific methods).

### Hybridization

[0105] In certain embodiments, the antisense modulators disclosed herein can hybridize with a target nucleic acid encoding FNIP1 and/or FNIP2. The most common mechanism of hybridization involves hydrogen bonding between complementary nucleobases of the antisense modulator and target nucleic acid, such as, for example, Watson-Crick, Hoogsteen, or reversed Hoogsteen hydrogen bonding. The conditions under which an antisense modulator can hybridize with a target nucleic acid molecule can vary. Under stringent conditions, an antisense modulator hybridizes in a sequence-dependent manner determined by the nature and composition of the nucleic acid molecules to be hybridized. Methods of determining whether an antisense modulator sequence can hybridize specifically to a target nucleic acid are well known in the art.

### Target Nucleic Acids, Target Regions, Target Segments and Nucleobase Sequences

[0106] In certain embodiments, an antisense modulator comprises an oligonucleotide, or portions thereof, that can hybridize to a target nucleic acid, wherein the target nucleic acid encodes FNIP1 and/or FNIP2.

[0107] In certain embodiments, target nucleic acids can comprise nucleobase sequences encoding FNIP1 and/or FNIP2, including but not limited to the following: the reverse complement of RefSeq Accession No. NC_000004.12 truncated from nucleotides 158767000 to 158910000 (incorporated herein as SEQ ID NO: 1), RefSeq Accession No. NM_020840.3 (incorporated herein as SEQ ID NO: 2), RefSeq Accession No. NM_001323916.2 (incorporated herein as SEQ ID NO: 3), RefSeq Accession No. NM_001346043.2 (incorporated herein as SEQ ID NO: 4), RefSeq Accession No. NM_001366843.1 (incorporated herein as SEQ ID NO: 5), RefSeq Accession No. XM_017008487.1 (incorporated herein as SEQ ID NO: 6), RefSeq Accession No. XM_005263158.2 (incorporated herein as SEQ ID NO: 7), RefSeq Accession No. XM_005263160.3 (incorporated herein as SEQ ID NO: 8), RefSeq Accession No. XR_001741297.1 (incorporated herein as SEQ ID NO: 9), RefSeq Accession No. XM_024454161.1 (incorporated herein as SEQ ID NO: 10), RefSeq Accession No. NC_000005.10 truncated from nucleotides 131639000 to 131799000 (incorporated herein as SEQ ID NO: 11), RefSeq Accession No. NM_133372.3 (incorporated herein as SEQ ID NO: 12), RefSeq Accession No. NM_001008738.3 (incorporated herein as SEQ ID NO: 13), RefSeq Accession No. NM_001346113.2 (incorporated herein as SEQ ID NO: 14), and RefSeq Accession No. NM_001346114.2 (incorporated herein as SEQ ID NO: 15). In some embodiments, antisense modulators can also target other nucleobase sequences encoding FNIP1 and/or FNIP2 (e.g. other DNA sequences, cDNA sequences, scaffolds, or mRNA transcript variants), which can be found by accession number in databases such as NCBI and GENBANK, and which are incorporated herein by reference. In other embodiments, nucleobase sequences encoding FNIP1 and/or FNIP2 include previous and future versions of nucleobase sequences encoding FNIP1 and/or FNIP2, which can be found by accession number in databases such as NCBI and GENBANK, and which are also incorporated herein by reference. In other embodiments, nucleobase sequences encoding FNIP1 and/or FNIP2 include mRNA transcripts that are formed from the utilization of alternative polyadenylation sites.

[0108] The nucleobase sequence set forth in each SEQ ID NO contained herein is independent of any modification to a nucleobase, a sugar moiety, or an internucleoside linkage. In some embodiments, antisense modulators, or portions thereof, that are defined by a percent complementarity or percent identity to a nucleobase sequence set forth in a SEQ ID NO or sample reference number (GiTx ID #) described herein can comprise, independently, one or more modifications to a nucleobase, one or more modifications to a sugar moiety, or one of more modifications to an internucleoside linkage.

[0109] In certain embodiments, an antisense modulator can hybridize to at least one target region within the target nucleic acid. A target region is a structurally defined region of the target nucleic acid. Examples of a target region include but are not limited to an exon, an intron, an exon-intron junction, an intron-exon junction, an exon-exon junction, a 3′ untranslated region (3′ UTR), a 5′ untranslated region (5′ UTR), a translation initiation region, a translation termination region, a 5′ donor splice site, a 3′ acceptor splice site, a start codon, an upstream open reading frame (ORF), a repeat region, a hexanucleotide repeat expansion, a splice enhancer region, an exonic splicing enhancer (ESE), a splice suppressor region, an exonic splicing silencer (ESS), an intronic splicing enhancer (ISE), an intronic splicing silencer (ISS), a RNA destabilization motif, a miRNA binding site, or other defined nucleic acid region. The structurally defined regions for FNIP1 and/or FNIP2 can be obtained by accession number from sequence databases such as NCBI and GENBANK, and such information is incorporated herein by reference.

[0110] In some embodiments, a target region can contain one or more target segments. In some embodiments, multiple target segments within a target region can be non-overlapping. In certain embodiments, target segments within a target region are separated by less than 5000, 2500, 1000, 500, 250, 100, 50, 40, 30, 20, 10, or 5 nucleotides. In other embodiments, target segments within a target region are overlapping or contiguous. In certain embodiments, an antisense modulator can hybridize to a 5′ target segment within a target region and a 3′ target segment within the same target region. In other embodiments, an antisense modulator can hybridize to a 5′ target segment within a target region and a 3′ target segment within a different target region.

[0111] A suitable target segment can specifically exclude a certain structurally defined target region, such as, for example, a start codon or a stop codon. The determination of suitable target segments can include a comparison of the nucleobase sequence of the target segment to other sequences throughout the genome. For example, the BLAST algorithm can be used to identify regions of similarity amongst different sequences. This comparison can enable the selection of antisense modulator sequences that have increased specificity for a target segment and a corresponding reduced likelihood of hybridizing in a non-specific manner to non-target or off-target sequences.

[0112] In some embodiments, targeting includes determination of at least one target segment within a target nucleic acid to which an antisense modulator, or portion thereof, can hybridize in order to produce a desired effect. The desired effect can be a decrease or increase in mRNA levels of a target nucleic acid. The desired effect can also be a decrease or increase in levels of a protein encoded by the target nucleic acid. The desired effect can also be a phenotypic change associated with a change in mRNA levels of a target nucleic acid or change in protein levels encoded by the target nucleic acid. In certain embodiments, the desired effect of using an antisense modulator to target at least one target segment within a target nucleic acid encoding FNIP1 and/or FNIP2 to which it hybridizes, is a reduction in FNIP1 and/or FNIP2 mRNA levels. In other embodiments, the desired effect of using an antisense modulator to target at least one target segment within a target nucleic acid encoding FNIP1 and/or FNIP2 to which it hybridizes is a reduction in FNIP1 and/or FNIP2 protein levels. In yet other embodiments, the desired effect of using an antisense modulator to target at least one target segment within a target nucleic acid encoding FNIP1 and/or FNIP2 to which it hybridizes is a phenotypic change associated with the reduction of FNIP1 and/or FNIP2 mRNA or protein levels. In certain embodiments, the desired effect of using an antisense modulator to target at least one target segment within a target nucleic acid encoding FNIP1 and/or FNIP2 to which it hybridizes, is an increase in FNIP1 and/or FNIP2 mRNA levels. In other embodiments, the desired effect of using an antisense modulator to target at least one target segment within a target nucleic acid encoding FNIP1 and/or FNIP2 to which it hybridizes is an increase in FNIP1 and/or FNIP2 protein levels. In yet other embodiments, the desired effect of using an antisense modulator to target at least one target segment within a target nucleic acid encoding FNIP1 and/or FNIP2 to which it hybridizes is a phenotypic change associated with the increase of FNIP1 and/or FNIP2 mRNA or protein levels.

Targeting FNIP1 and/or FNIP2 Nucleic Acids

[0113] In certain embodiments, the antisense modulators described herein, or portion thereof, can hybridize to any target nucleic acid comprising nucleotide sequences encoding FNIP1 and/or FNIP2. In some embodiments, the antisense modulators can hybridize to target nucleic acids at any stage of RNA processing within the cell, for example, pre-mRNA or mature mRNA. In yet other embodiments, antisense modulators can hybridize to any target region(s) within the target nucleic acid, for example, an exon, an intron, a 5′ UTR, a 3′ UTR, a repeat region, a hexanucleotide repeat expansion, a miRNA binding site, a splice junction, an exon-exon junction, an exon-intron junction, an intron-exon junction, an exonic splicing silencer (ESS), an exonic splicing enhancer (ESE), an intronic splicing enhancer (ISE), an intronic splicing silencer (ISS), exon 1, exon 2, exon 3, intron 1, or intron 2, etc. In one embodiment, antisense modulators can hybridize to at least one exon present in SEQ ID NOs: 1-15. In other embodiments, antisense modulators can hybridize to target regions other than exons that are present in SEQ ID NOs: 1-15, wherein such regions are described in databases such as NCBI and GENBANK, which are incorporated herein by reference.

[0114] In certain embodiments, the antisense modulators described herein can hybridize to all RNA transcript variants of FNIP1 and/or FNIP2. In other embodiments, the antisense modulators described herein hybridize selectively to at least one RNA transcript variant of FNIP1 and/or FNIP2. Transcript variants of FNIP1 and/or FNIP2 can include mRNA transcripts generated by differential splicing, or mRNA transcripts containing mutations (e.g., SNPs, INDELs etc.) when compared to a reference sequence. In certain embodiments, the antisense modulators described herein inhibit the expression of all transcript variants of FNIP1 and/or FNIP2. In certain embodiments, the antisense modulators described herein inhibit expression of all transcript variants of FNIP1 and/or FNIP2 equally. In certain embodiments, the antisense modulator described herein preferentially inhibits the expression of certain transcript variants of FNIP1 and/or FNIP2. In other embodiments, the antisense modulators described herein increase the expression of all transcript variants of FNIP1 and/or FNIP2. In certain embodiments, the antisense modulators described herein increase the expression of all transcript variants of FNIP1 and/or FNIP2 equally. In certain embodiments, the antisense modulator described herein preferentially increases the expression of certain transcript variants of FNIP1 and/or FNIP2. In certain embodiments, antisense modulators described herein are useful for reducing cytoplasmic TDP-43 aggregates, or increasing the levels of functional TDP-43 in the nucleus, or a combination thereof. In certain embodiments, antisense modulators described herein are useful for normalizing the expression of various mis-regulated genes.

[0115] In certain embodiments, provided herein are antisense modulator sequences designed to target various regions of FNIP1 and/or FNIP2 transcripts produced by the FNIP1 gene (RefSeq Accession No. NC_000005.10 truncated from nucleotides 131639000 to 131799000, incorporated herein as SEQ ID NO: 11) and/or the FNIP2 gene (the reverse complement of RefSeq Accession No. NC_000004.12 truncated from nucleotides 158767000 to 158910000, incorporated herein as SEQ ID NO: 1). In some embodiments, the nucleotide sequence, target start site, target stop site, and description of example antisense oligonucleotide modulator sequences targeting FNIP1 are specified in Table 1. In other embodiments, the nucleotide sequence, target start site, target stop site, and description of example antisense oligonucleotide modulator sequences targeting FNIP2 are specified in Table 4. The predicted binding energy of each antisense modulator to the target sequence, as calculated using software known in the art, such as RNAstructure, are also described under “Binding Score” in Table 1 and Table 4 (see SEQ ID NOs: 16-1494). Antisense modulators with greater binding energy (more negative binding score) are predicted to hybridize better to the target sequence.

### Complementarity

[0116] An antisense modulator is said to be complementary to a target nucleic acid, for example a target nucleic acid encoding FNIP1 and/or FNIP2, when one or more nucleobases of the antisense modulator can hydrogen bond with the corresponding complementary nucleobases of the target nucleic acid, such that the antisense modulator can hybridize in a sequence-dependent manner to the target nucleic acid. In certain embodiments, an antisense modulator can comprise one or more non-complementary nucleobases to the target nucleic acid, provided that the antisense modulator retains its ability to hybridize to the target nucleic acid. In certain embodiments, when two or more non-complementary nucleobases are present, they can be contiguous (i.e., linked) or clustered together. In other embodiments, when one or more non-complementary nucleobases are present, they can be interspersed with complementary nucleobases and need not be contiguous to each other or to complementary nucleobases. In certain embodiments, one or more non-complementary nucleobases can be located either at the 5′ end, 3′ end, internal region, or a mix of any regions of the antisense modulator. In one embodiment, a non-complementary nucleobase is present in the wing region of an antisense oligonucleotide modulator comprising a gapped sequence, as described in more detail below. An antisense modulator can also hybridize to one or more target segments in the target nucleic acid, such that adjacent or intervening segments do not take part in the hybridization event (e.g., forming a hairpin or loop structure, or mismatch).

[0117] In certain embodiments, provided herein are antisense modulators, or specified portions thereof, that are at least 40%, 50%, 60%, 70%, 75%, 80%, 85%, 90%, 95%, 96%, 97%, 98%, 99%, or 100% complementary to an equal length portion of a target nucleic acid, a target region, or a target segment encoding or associated with FNIP1 and/or FNIP2, such as described in SEQ ID NOs: 1-15. By way of example, an antisense modulator in which 16 of its 20 nucleobases are complementary to a target nucleic acid encoding FNIP1 and/or FNIP2, and would therefore specifically hybridize to it, would represent 80% complementarity. Methods to determine percent complementarity, percent homology, or sequence identity of an antisense modulator to a target nucleic acid, a target region, or a target segment, are well known in the art, for example, using basic local alignment search tools (BLAST) and PowerBLAST programs (Altschul et al., Journal of Molecular Biology, 215: 403-410 (1990); Zhang and Madden, Genome Research, 7: 649-656 (1997)), and the Gap program (Wisconsin Sequence Analysis Package) that relies on the Smith and Waterman algorithm (Smith and Waterman, Advances in Applied Mathematics, 2: 482 489 (1981)). These methods, along with their respective publications and those references cited within, are incorporated herein in their entirety.

[0118] In certain embodiments, provided herein are antisense modulators, or specified portions thereof, that are 100% complementary (i.e., fully complementary) to a target nucleic acid, a target region or a target segment, for example, encoding FNIP1 and/or FNIP2. As used herein, “fully complementary” means each nucleobase of an antisense modulator is capable of specific base pairing with complementary nucleobases of a target nucleic acid. By way of example, an antisense modulator that is 18 nucleobases long is said to be fully complementary to a target nucleic acid that is 3667 nucleobases long if all 18 nucleobases of the antisense modulator is capable of specific base pairing with complementary nucleobases of the target nucleic acid.

[0119] In some embodiments, complementarity can be determined for a specified portion of an antisense modulator. By way of example, a 20 nucleobase portion of a 35 nucleobase antisense modulator can be said to be fully complementary to a target nucleic acid that is 3667 nucleobases long if the 20 nucleobase portion can undergo specific base pairing with complementary nucleobases of the target nucleic acid. At the same time, in some embodiments, the entire 35 nucleobase antisense modulator can be fully complementary to the target nucleic acid sequence if the remaining 15 nucleobases of the antisense modulator are also complementary to the target sequence. In other embodiments, the 35 nucleobase antisense modulator is not fully complementary to the target nucleic acid sequence if the remaining 15 nucleobases of the antisense modulator are not fully complementary to the target sequence.

[0120] In certain embodiments, antisense modulators that are up to 10, 15, 20, 25, 30, or 35 nucleobases in length comprise no more than 1, no more than 5, no more than 10, no more than 15, no more than 20, or no more than 25 non-complementary nucleobase(s) respectively, relative to a target nucleic acid, such as a target nucleic acid encoding FNIP1 and/or FNIP2, or a specified portion thereof.

[0121] In certain embodiments, provided herein are antisense modulators that are complementary to a specified portion of a target nucleic acid, as defined by a number of contiguous (i.e. linked) nucleobases within a target region or target segment of a target nucleic acid. In some embodiments, the antisense modulator is complementary to at least 8, 10, 12, 14, 16, 18, 20, 22, 24, 26, 28, 30, 32, 34, or more contiguous nucleobases of a target nucleic acid, for example encoding FNIP1 and/or FNIP2, or a range defined by any two of these values.

### Identity

[0122] In certain embodiments, the antisense modulators provided herein can have a defined percent identity to a particular nucleotide sequence, SEQ ID NO, or oligonucleotide represented by a specific sample reference number (e.g., GiTx ID #), or portion thereof, disclosed herein. An antisense modulator is identical to a sequence disclosed herein if both possess the same nucleobase pairing ability to a complementary target nucleotide sequence, regardless of other modifications to the antisense modulator. For example, a DNA or other antisense modulator with nucleobase thymine at given position(s) is identical to an RNA sequence disclosed herein with nucleobase uracil at those equivalent position(s), since both thymine and uracil base pair with adenine. In another example, an RNA or other antisense modulator with nucleobase uracil at given position(s) is identical to a DNA sequence disclosed herein with nucleobase thymine at the equivalent positions(s). Other examples include the use of synthetic nucleobases that have the same nucleobase pairing ability as standard nucleobases, such as that of adenine, guanine, thymine, cytosine, and uracil. In certain embodiments, antisense modulators that are lengthened and shortened versions of the oligonucleotides and nucleotide sequences disclosed herein are contemplated. In certain embodiments, antisense modulators that have non-identical nucleobases relative to the oligonucleotides and nucleotide sequences disclosed herein are also contemplated. The non-identical nucleobases can be contiguous (i.e. linked or adjacent) with each other or dispersed throughout the antisense modulator. The percent identity of an antisense modulator relative to a sequence disclosed herein is derived by calculating the percentage of nucleobases of the antisense modulator that can undergo identical base pairing as compared with the sequence disclosed herein.

[0123] In certain embodiments, antisense modulators, or portions thereof, are at least 40%, 50%, 60%, 70%, 75%, 80%, 85%, 90%, 95%, 96%, 97%, 98%, 99%, or 100% identical to an equal length portion of one or more particular nucleotide sequence described in SEQ ID NOs: 16-1494, or oligonucleotide represented by a GiTx ID #, or portion thereof disclosed herein. In certain embodiments, provided herein are antisense modulators that are identical to a specified portion of a nucleobase sequence, as defined by a number of contiguous (i.e. linked) nucleobases in the nucleobase sequence. In some embodiments, the antisense modulator consists of at least 8 consecutive nucleobases with at least 70%, at least 80%, at least 85%, at least 90%, at least 95%, at least 98%, or 100% identity to any of the nucleobase sequences of SEQ ID NOs: 16-1494. In other embodiments, the antisense modulator consists of at least 12 consecutive nucleobases with at least 70%, at least 80%, at least 85%, at least 90%, at least 95%, at least 98%, or 100% identity to any of the nucleobase sequences of SEQ ID NOs: 16-1494.

### Modifications

[0124] Modifications to an antisense modulator can be made to increase its efficacy, stability, and/or ease of administration, as well as decrease toxicity or other harmful side effects. Certain embodiments of the invention can include such modifications, which include, but are not limited to, modifications of the backbone or internucleoside linkages, modifications of the sugar component, modifications of the nucleobase component, or other modifications of the structure or chemistry of the nucleotide. All modulators and their modifications mentioned herein include salts, mixed salts, esters, salts of esters, and free acid or base forms. Certain embodiments can include a combination of one or more of the modifications mentioned below. Certain embodiments can include a combination of one or more of the modifications mentioned below with one or more unmodified nucleotides. All modifications to nucleotides mentioned herein that remove or otherwise modify naturally occurring components of nucleotides are still considered nucleotides, respectively. By way of example, a nucleotide that is missing a phosphorus or phosphate component, or that has its natural phosphate internucleoside linkage replaced by a phosphorothioate linkage for instance, or that has a ribose or deoxyribose component replaced by a modified sugar component, is still considered a nucleotide. Likewise, an oligonucleotide comprising a chain of at least two nucleotides, including the modified nucleotides described herein, is still considered an oligonucleotide, even if the component nucleotides in the oligonucleotide are covalently bonded in a manner that is modified from that of the naturally found phosphodiester bond. By way of example, a compound formed by two modified nucleotides covalently bonded with a phosphorothioate bond, is considered an oligonucleotide.

[0125] Modifications to an antisense modulator can be made along the backbone (i.e., linkages between different nucleosides). In one embodiment, the modification is the inclusion of a modified phosphoester group. In one embodiment, the modification is the inclusion of a phosphorothioate group or linkage. Phosphorothioate linkages have been shown to increase the resistance of antisense modulators to nucleases and thus increase their overall stability, while also able to maintain cleavability by certain ribonucleases (RNases), such as RNase H, once paired with a complementary or near-complementary oligonucleotide strand, thus increasing effectiveness in certain antisense applications (Eckstein F, Nucleic Acid Therapeutics, 24(6), 374-387 (2014)). This resistance has been found in both DNA and RNA and can be implemented in a wide range of nucleotide-based therapeutic modalities, including both ASO and RNAi therapies. In addition, phosphorothioate linkages can increase bioavailability of the modulator in certain cases by improving overall cellular uptake of the modulator.

[0126] Other embodiments of backbone modifications include the use of other phosphorothioate-based linkages, such as chiral phosphorothioate linkages, phosphorodithioate linkages, and phophorotrithioate linkages; phosphotriesters and alkylphosphotriesters; phosphonates, such as chiral phosphonates, 3′- and 5′-alkylene phosphonates, methylphosphonates (including 5′-O-methylphosphonate and 3′-O-methylphosphonate), hydroxyphosphonates, thionoalkylphosphonates, and other alkyl phosphonates; phosphonoacetate and thiophosphonoacetate linkages; phosphoroamidates, such as N3′-P5′ phosphoramidates, cationic phosphoramidates, methoxyethyl phosphoramidates, aminoalkylphosphoramidates, thiophosphoramidates, dithiophosphoramidates, thionophosphoramidates, and methanesulfonyl phosphoramidates; phosphonoamidate and phosphonothioate linkages; other thio-linked backbones; other phosphate backbones, such as 3′-5′ linked and 2′-5′-linked selenophosphates and boranophosphates, as well as those phosphates with inverted polarity with 3′-3′, 5′-5′, or 2′-2′ linkages; phosphinate linkages; acetyl- and thioacetyl-based linkages; other sulfur-containing backbones, such as sulfonate, sulfamide, sulfamate, sulfone, sulfoxide, and sulfide; silicon-containing backbones, such as siloxane and silyl; other heteroatom backbones such as those backbones containing N, O, or S; linkages with mixed heteroatoms; CH₂-containing linkages; carbonate-modified linkages; carboxymethyl-modified linkages; carbamate-modified linkages; short chain alkyl or cycloalkyl linkages; alkene- and azide-containing linkages; formacetal thioformacetal, methylene formacetal, and methylene thioformacetal linkages; methyleneimino linkages; hydrazino- and methylhydrazino-based linkages; methylene methylimino linkages; 5′-5′ linkages exposing two 3′ ends, as described by Bhagat et al. (Bhagat L et al., Journal of Medicinal Chemistry, 54(8): 3027-3036 (2011)), which, along with its references, is incorporated herein in its entirety; and other backbones known to those skilled in the art. In one embodiment, the modulator includes one of the backbone modifications described herein or other backbone modifications as known by a person skilled in the art.

[0127] Modifications to an antisense modulator can be made by modifying the sugar component of the modulator molecule. This sugar component is referred to as ribose or deoxyribose of RNA and DNA, respectively, but can also include other sugar components in other nucleotides. In one embodiment the sugar component of at least one nucleotide of the modulator is modified to include a 2′-O-methoxyethyl group (also referred herein as 2′-MOE). The 2′-MOE modification has been demonstrated to enhance nuclease resistance, as well as to lower cell toxicity and increase binding affinity with the desired modulator target. In one embodiment, the 2′-MOE modification includes a 2′, 4′-constrained 2′-MOE modification, as described by Pallan et al. (Pallan P S et al., Chemical Communications, 48(66): 8195-8197 (2012)), which, along with its references, is incorporated herein in its entirety. In one embodiment, the 2′ OH-group of at least one nucleotide in the modulator is replaced by at least one of H, SH, F, Cl, Br, I, NH₂, or ON. In another embodiment the 2′ OH-group of at least one nucleotide in the modulator is replaced by at least one of R, SR, NHR, or NR₂. R is defined, in this case, as one of C₁-C₆ alkyl, alkenyl, or alkynyl. In another embodiment, the sugar modification of the modulator is a 2′-O-methyl (2′-OMe) modification. In one specific embodiment, a 2′-OMe or other 2′-O-alkyl group modification is made to sugar groups of the modulator located at the two nucleotides closest to the 5′ end of the sequence. In the case of an RNAi modulator, this modification can be made on the 5′ end of both the sense and anti-sense strands, as described by U.S. Pat. No. 7,834,171, which, along with its references, is incorporated herein in its entirety. In certain embodiments, the sugar component of at least one nucleotide of the modulator is modified to include a bicyclic sugar, such as a 4′-CH(R)—O-2′ or 4′ (CH₂)₂—O-2′, wherein R is independently selected from H, C1-C12 alkyl, or a protecting group. In one embodiment, the sugar component of at least one nucleotide of the modulator is modified to include a bicyclic sugar consisting of a 4′-CH(CH₃)—O-2′ bridge or constrained ethyl (cEt) modification. A cEt modification can improve the effectiveness and allele selectivity of the antisense modulator and is further described by Pallan et al. In another embodiment, the modification of at least one nucleotide includes a tetrahydropyran-modified nucleoside. Other embodiments include the modification of at least one nucleotide of the antisense molecule to include a 2′-dimethylaminooxyethoxy group or 2′-dimethylaminoethoxyethoxyl group or other moieties obvious to those skilled in the arts.

[0128] Modifications to an antisense modulator can be made by modifying the nucleobase component of the modulator molecule. The nucleobase component refers to the nitrogen-containing compounds that, along with the sugar component, form nucleosides. Nucleobases found in nucleotides and elsewhere include adenine, guanine, cytosine, thymine, uracil, and their isomers. Examples of other nucleobases or modifications to nucleobases can include 5-methylcytosine, 5-hydroxymethyl cytosine, xanthine, hypoxanthine, methylhypoxanthine, 1-methylcytosine, 2-O-methylcytosine, 2,6-diaminopurine, 6-methyl, 2-propyl, and other alkyl derivatives of adenine and guanine, 2-thiouracil, 2-thiothymine, 2-thiocytosine, 2-F-adenine, 2-aminoadenine, 2-aminopyridine, 2-amino-6-hydroxyaminopurine, 2-deoxyuridine, 3-ethylcytosine, 3 methylcytosine, 6-hydroxyaminopurine, 6-hydroxymethyladenine, 2-pyridone, 5-halo, including 5-bromo, 5-trifluoromethyl, 5-chloro, 5-fluoro, and other 5-halo, uracils and cytosines, 5-propynyl uracil and cytosine and other alkynyl-modified pyrimidine bases, 6-azouracil, 6-azocytosine, 6-azothymine, 5-uracil, 4-thiouracil, 3-deazaguanine, 3-deazaadenine tricyclic pyrimidines, and O- and N-alkylation, including N6-methyladenosine and N6-carbamoylmethyladenine, 3,N4-ethenocytosine, 1N2-ethenoguanine, N2,3-ethenoguanine, N2, N2-dimethylguanosine, carboxylethylguanine, 4-methylcytosine, 5-carboxylcytosine, 5-formylcytosine, 5-hydroxymethylcytosine, 5-glucosylmethylcytosine, methylthymine, 5,6-dihydrothymine, 5-hydroxymethyluracil, formyluracil, carboxyluracil, tricyclic pyrimidines, phenothiazine cytidine, G-clamps, carbazole cytidine, and pyridoindole, cytidine, 7-methylguanine, 7-methyladenine, 7-deazaguanine, 7-amido-7-deazaguanine, 7-deazaadenine, 8-halo, 8-amino, 8-thiol, 8-thioalkyl, 8-hydroxyl, and other 8-substituted adenines and guanines, 8-azaguanine, 8-azaadenine, inosine, 8-oxoguanine. In one embodiment, at least one nucleobase in at least one nucleotide of the antisense modulator is modified or replaced with at least one of the nucleobases or modified nucleobases mentioned above. In one embodiment the modification of the antisense modulator is a substitution of at least one cytosine nucleobase with 5-methylcytosine. In one embodiment, all cytosine nucleobases of the antisense modulator are substituted with 5-methylcytosine. The 5-methylcytosine substitution can lower the immunogenicity of antisense modulators and is a modification that is preferred in many forms of antisense compounds. In another embodiment, the antisense modulator is modified to have both at least one 5-methylcytosine substitution and at least one 2′-MOE sugar modification.

[0129] In one embodiment, the antisense modulator is modified to comprise phosphorodiamidate morpholino oligonucleotides (also referred to herein as PMOs or morpholinos). A PMO can be constructed with at least one nucleoside comprising a sugar component, such as ribose or deoxyribose, that has been substituted with a methylenemorpholine ring. This modified nucleoside can be linked to others via a phosphorodiamidate linkage, in place of a phosphodiester linkage. PMOs have been demonstrated to be resistant to a variety of enzymes, including nucleases, esterases and proteases. PMOs, as uncharged molecules, also present limited interactions with charged molecules, such as proteins. These advantages can make PMOs a suitable modification for use in antisense applications, in which increased stability in vitro and in vivo and high target specificity can be important factors for consideration. Descriptions of morpholinos, as well as their properties and variations, included in some of the embodiments herein, can be found in U.S. Pat. Nos. 9,469,664 and 10,202,602, which, along with their references, are incorporated herein in their entirety.

[0130] In one embodiment, the antisense modulator is modified to comprise locked nucleic acids (LNA). LNAs are nucleotides that have a sugar component modified to comprise a 2′ O to 4′ C methylene linkage. These modified nucleotides provide higher resistance to cleavage by digestive enzymes such as nucleases, as well as present much higher binding affinities to complementary or near-complementary nucleic acid-based targets. In another embodiment, the antisense modulator is modified to comprise other bridged nucleic acids (BNA), such as the 2′, 4′-BNA^{NC}[N-Me] modification. Descriptions of LNAs, as well as their properties and variations, included in some of the embodiments herein can be found in U.S. Pat. No. 9,428,534, which, along with its references, is incorporated herein in its entirety.

[0131] In one embodiment, the antisense modulator is modified to comprise tricyclo-DNA (tcDNA). tcDNA modifications can provide several benefits, including improved nuclease resistance, binding stability and improved targeting. The structure and other pertinent information of tc-DNA included in some of the embodiments herein are described by Ittig et al. (Ittig, D et al., Artificial DNA PNA & XNA 1(1): 9-16 (2010)) and U.S. Pat. No. 10,465,191, which, along with their references, are incorporated herein in their entirety.

[0132] In one embodiment, the antisense modulator is a modified oligonucleotide containing a gap segment (also referred to herein as “gapped sequences”, and otherwise known as “gapmers”). These gapped sequences comprise a sequence of unmodified or modified nucleosides (also referred to herein as the “central sequence”) flanked on at least one end by at least one sequence of either unmodified or modified nucleosides (also referred to herein as the “wing sequence”). In one embodiment, the central sequence comprises unmodified DNA nucleosides, which when hybridized to a target RNA, allows for endonucleases such as RNase H to cleave the target RNA. In another embodiment, the central sequence comprises a mix of modified and unmodified nucleosides, which when hybridized to a target RNA, allows for RNase H cleavage. In one embodiment, the antisense modulator comprises a central sequence flanked by wing sequences at both the 5′ and 3′ ends of the central sequence, wherein at least one nucleoside of the wing sequences comprises a modified sugar. In one embodiment, the wing sequence is a combination of modified and unmodified nucleosides. In one embodiment, the wing sequences comprise nucleosides wherein each nucleoside comprises a modified sugar. In certain embodiments, the central sequence is chosen to consist of 6, 7, 8, 9, 10, 11, 12, 13, 14, 15, 16, 17 or 18 linked nucleosides. In certain embodiments, the wing sequences are each independently chosen to consist of 2, 3, 4, 5, or 6 linked nucleosides. In one embodiment, the central sequence consists of 10 linked nucleosides flanked by wing sequences at the 5′ and 3′ ends of the central sequence, wherein each wing sequence consists of 5 linked nucleosides. In one embodiment, the central sequence consists of 10 linked nucleosides flanked by wing sequences at the 5′ and 3′ ends of the central sequence, wherein each wing sequence consists of 4 linked nucleosides. In one embodiment, the central sequence consists of 10 linked nucleosides flanked by wing sequences at the 5′ and 3′ ends of the central sequence, wherein each wing sequence consists of 6 linked nucleosides. In one embodiment, the antisense oligonucleotide comprises a gapped sequence consisting of a central sequence of 10 deoxynucleotides, which are flanked on both sides by wing sequences each consisting of 4 2′-MOE modified nucleotides. In another embodiment, the antisense oligonucleotide comprises a gapped sequence consisting of a central sequence of 10 deoxynucleotides, which are flanked on both sides by wing sequences each consisting of 5 2′-MOE modified nucleotides. Gapped sequences can increase resistance to enzymes, such as nucleases, and, in some cases, reduce the need for phosphorothioate modifications. In one embodiment, the gapped sequence comprises a central sequence flanked by wing sequences containing at least one LNA or BNA modification. In another embodiment, the gapped sequence comprises a central sequence flanked by wing sequences comprising at least one nucleoside consisting of a 2′-MOE modified sugar. In one embodiment, the gapped sequence comprises a central sequence flanked by wing sequences comprising nucleosides wherein each nucleoside consists of a 2′-MOE modified sugar. In another embodiment, the gapped sequence comprises a central sequence flanked by wing sequences comprising at least one nucleoside consisting of tcDNA. In another embodiment, the gapped sequence comprises a central sequence flanked by wing sequences comprising at least one nucleoside consisting of a cEt modification. In one embodiment, the wing sequences can be one or more of a combination of the aforementioned modified sequences. Other gapped sequences included in the embodiments herein are described in U.S. Pat. Nos. 7,015,215 and 10,017,764, which are incorporated, along with their references, herein in their entirety.

[0133] Gapped sequences containing modified nucleosides in the central sequence can reduce cellular protein-binding and improve the therapeutic index of the antisense modulator, as described by Shen et al. (Shen et al., Nature Biotechnology, 37(6): 640-650 (2019)), which, along with its references, is incorporated herein in its entirety. In some embodiments, the central sequence of the gapped sequence comprises at least one nucleoside consisting of a modified sugar. In some embodiments, the second nucleoside of the central sequence from the 5′ end of the gapped sequence consists of a modified sugar, such as a cEt or 2′-OMe modified sugar. In another embodiment, the antisense oligonucleotide comprises a gapped sequence consisting of a central sequence of deoxynucleotides, which are flanked on both sides by wing sequences consisting of 2′-MOE modified nucleotides, wherein the second nucleotide of the central sequence from the 5′ end of the oligonucleotide contains a 2′-OMe sugar modification. In another embodiment, the antisense oligonucleotide comprises a gapped sequence consisting of a central sequence of 10 deoxynucleotides, which are flanked on both sides by wing sequences each consisting of 4 2′-MOE modified nucleotides, and wherein the second nucleotide of the central sequence from the 5′ end of the oligonucleotide contains a 2′-OMe sugar modification.

[0134] In one embodiment, the antisense modulator comprises a peptide nucleic acid (PNA). PNAs are modified nucleic acids that can be created through the substitution of the nucleotide backbone for a pseudopeptide backbone (e.g., N-(2-aminoethyl)-glycine), which links nucleosides together via peptide bonds. The lack of charged groups in the backbone of PNAs provide for higher affinity and specificity between the modified antisense modulator and its complementary or near-complementary oligonucleotide target. In one embodiment, the PNA comprises a GripNA compound (Active Motif, Inc., Carlsbad, Calif.). In another embodiment, the PNA is a phosphono-PNA molecule comprising an additional phosphate group, as described by Efimov et al. (Efimov, V A et al., Nucleic Acids Research, 26(2): 566-575 (1998)). In another embodiment, the PNA molecule contains charged groups to promote intracellular delivery (e.g., see Efimov, V A et al., Nucleosides, Nucleotides & Nucleic Acids, 24(10-12): 1853-1874 (2005). Certain types of PNAs included in the embodiments herein are described in U.S. Pat. No. 6,962,906 and Montazersaheb et al. (Montazersaheb S et al., Advanced Pharmaceutical Bulletin, 8(4): 551-563 (2018)), which are incorporated, along with their references, herein in their entirety.

[0135] In one embodiment, the antisense modulator includes at least one bifacial nucleotide, also known as a Janus base. A Janus base comprises two binding sites to a complementary nucleotide, which can be used to simultaneously bind to both sense and antisense strands of a target oligonucleotide through Watson-Crick bonding. Benefits of using a Janus base modification include potentially higher target specificity and higher levels of target deactivation or efficacy. Examples and descriptions of Janus bases can be found in Thadke et al. (Tadke SA, Communications Chemistry, 1(79) (2018)) and Asadi et al. (Asadi A, The Journal of Organic Chemistry, 72(2): 466-475 (2007)), both of which are incorporated herein, along with their references, in their entirety.

[0136] In one embodiment, the antisense modulator forms a chimeric compound. Chimeric compounds can comprise one of many configurations, including, but not limited, to RNA-DNA, PNA-DNA, PNA-RNA, and other modified or unmodified oligonucleotide analogues bound to other modified or unmodified oligonucleotides. Certain uses of chimeric compounds, for example, can include providing one region that confers improved nuclease resistance, while another region increases specificity of binding or binding stability to a complementary or near-complementary target. Other chimeric compounds can offer other combinations of benefits, including any of the benefits specified for the modifications mentioned above.

[0137] These modifications described herein and other modifications, including modifications to internucleoside backbones, sugars and nucleobases, as well as conjugates and methods of delivery described below, are described in part by Shen and Corey (Shen X and Corey DR, Nucleic Acids Research, 46(4): 1584-1600 (2018)), Smith and Rula (Smith CIE and Zain R, Annual Review of Pharmacology and Toxicology, 59: 605-630 (2019)), Khvorova and Watts (Khvorova A and Watts JK, Nature Biotechnology, 35(3): 238-248 (2017)), Manoharan (Manoharan M, Biochimica et Biophysica Acta, 1489(1): 117-130 (1999)), Chawla et al., (Chawla M et al., Nucleic Acids Research, 43(14): 6714-6729 (2015)), and U.S. Pat. Nos. 9,399,774 and 8,101,743, 7,407,943, all of which, along with each of their references, are incorporated herein in their entirety. Other modifications are known to those skilled in the art and are considered to be included in the embodiments herein.

### Conjugates, Complexes, and Structures

[0138] Certain embodiments of the invention comprise antisense modulators conjugated or bonded to at least one other molecule, such as a peptide or polypeptide, lipid, sugar, nucleotide or oligonucleotide, other polymer, cleavage agent, transport agent, intercalating agent, molecular beacon, hybridization-triggered crosslinking agent, lipophilic agent, and hydrophilic agent. These conjugated or bonded complexes can provide a number of benefits to the antisense modulator, including, but not limited to, increased effectiveness or activity, improved delivery to specific tissues or cells, enhanced cellular uptake, lowered toxicity, resistance to nuclease degradation, increased half-life or residence time, enhanced pharmacodynamic or pharmacokinetic properties, and improved selective targeting of alleles, genes or other targets. Certain embodiments can include a combination of one or more of the complexes mentioned below.

[0139] In one embodiment, the antisense modulator is conjugated to a protein or other polyamide, amine, or similar molecule. In another embodiment, the antisense modulator is conjugated to a lipid, phospholipid, cholesterol or thiocholesterol, cholic acid, aliphatic chain, hexylamino-carbonyl-oxycholesterol, or other similar molecule. In another embodiment, the antisense modulator is conjugated to another organic molecule, such as an ether or thioether, steroid, biotin, phenazine, folate, phenanthridine, anthraquinone, acridine, adamantine acetic acid, palmityl, fluorescein, rhodamine, coumarin, dye or other marker molecule, or other polymer, such as polyethylene glycol. In another embodiment, the antisense modulator is conjugated to another drug or pharmaceutical agent used to treat, prevent or ameliorate the symptoms of ALS or other degenerative disease, such as edaravone, riluzole, dextromethorphan, quinidine sulfate, dexpramipexole, or baclofen in the case of ALS. In some embodiments, the antisense modulator is conjugated to another drug or pharmaceutical agent used to treat, prevent or ameliorate a TDP-43 proteinopathy. In some embodiments, the antisense modulator is conjugated to another drug or pharmaceutical agent used to treat, prevent or ameliorate cancer. In certain embodiments, the antisense modulator is conjugated to another drug or pharmaceutical agent used to treat, prevent or ameliorate oxidative stress, or obesity. In other embodiments, the antisense modulator is conjugated to another drug or pharmaceutical agent used to treat, prevent or ameliorate VHL disease, BHD syndrome, or spontaneous pneumothorax. In other embodiments, the antisense modulator is conjugated to another drug, such as for example, another drug alleviating pain or other symptoms or improving uptake or delivery, such as blood thinners (e.g., aspirin, warfarin), anti-inflammatory and pain relief drugs (e.g., COX inhibitors, phenylbutazone, ibuprofen, suprofen, fenbufen, ketoprofen, pranoprofen, carprofen, indomethacin, folinic acid, taiprofenic acid, diclofenac, niflumic acid, diazepines or benzodiazepines, barbiturate); or antibacterial, antiviral, antibiotic, or other drug that promotes at least one benefit in a therapeutic setting, including treatment efficacy, symptom alleviation, drug tolerance, or side effect mediation. In another embodiment, the antisense modulator is conjugated to another agent promoting transport across cell membranes, such as those described in Letsinger et al. (Letsinger et al., PNAS, 86(17): 6553-6556 (1989)), Zhao et al. (Zhao et al., Current Opinion in Biomedical Engineering, 13: 76-83 (2020)) or another agent promoting transport across the blood-brain barrier, as described in PCT Patent WO89/10134. All three references, along with the references described therein, are incorporated herein in their entirety. In another embodiment, the antisense modulator is conjugated to one or more GalNAc residues, which are recognized by the asialoglycoprotein receptor resulting in efficient uptake into cells. In one embodiment, the antisense modulator is conjugated to a G-quadruplex, as described by PCT Patent WO2017188898, which, along with its references, is incorporated herein in its entirety. In another embodiment, the antisense modulator is conjugated to another compound with special electromagnetic or optical properties, such as a photo-labile protecting group, as described by PCT Patent WO2017157950, which, along with its references, is incorporated herein in its entirety. In yet another embodiment, the antisense modulator is conjugated on at least one terminus to at least one stabilizing group to enhance properties such as, for example, nuclease stability. In one embodiment, the stabilizing groups are cap structures such as, for example, inverted deoxy abasic caps. Other stabilizing groups that can be used to cap one or both ends of an antisense modulator to impart nuclease stability are described in PCT Patent WO2003004602, which, along with its references, is incorporated herein in its entirety. Other conjugates, included in the embodiments herein, are described by Benizri et al. (Benizri et al., Bioconjugate Chemistry, 30: 366-383 (2019)), which, along with its references, is incorporated herein in its entirety.

### Methods of Delivery

[0140] In certain embodiments, provided herein are methods and compositions for the delivery of antisense modulators into a cell, an animal, or human subject. In one embodiment, the antisense modulators are capable of decreasing or inhibiting the expression or activity of FNIP1 and/or FNIP2. In another embodiment, the antisense modulators are capable of increasing the expression or activity of FNIP1 and/or FNIP2. Many of these methods and compositions are known to those skilled in the art. In other embodiments, the methods and compositions for the delivery of antisense modulators described herein are also applied, with suitable modifications in some cases, to the delivery of other types of modulators, such as for example, other oligonucleotide modulators, antibody modulators, peptide modulators, or small molecule modulators.

[0141] In one embodiment, the method of delivery of antisense modulators includes direct introduction, or transfection, into a cell, an animal, or a human subject, via a transfection reagent, such as a liposomal-based or amine-based transfection reagent. This method of delivery can be used with or without aforementioned modifications or conjugations to the antisense modulator. Certain modifications and conjugations can improve the rate of introduction or stability of the antisense modulator and are included in these embodiments. For example, implementing any of the aforementioned modifications that imbue the antisense modulator with increased nuclease resistance can increase stability of the antisense modulator during and after introduction into a cell, an animal, or a human subject. Another example is the conjugation of the antisense modulator with a charged molecule or amphiphilic molecule to promote delivery across the cell membrane. In another embodiment, the method of delivery is electroporation or permeabilization. In another embodiment, the method of delivery includes the use of a liposome. In another embodiment, the method includes other forms of lipid-mediated transport. In another embodiment, the method of delivery involves the use of membrane fusion. In another embodiment, the method of delivery includes the use of colloids containing polymeric particles or solutions of nanoparticles. Nanoparticles can include certain properties that assist in targeting certain areas for delivery or otherwise promote delivery, such as electromagnetic properties. In another embodiment, the method of delivery includes the use of chemical-mediated transport, including the use of calcium phosphate. In another embodiment, the method of delivery includes peptide-mediated transport, including the use of polylysine. In another embodiment, the method of delivery includes the use of endocytosis. In other embodiments, the method of delivery can include microinjections directly into cells. In one embodiment, antisense modulators are delivered naked without transfection reagents. Other methods and examples of methods are described by Dokka and Rojanasakul (Dokka and Rojanasakul, Advanced Drug Delivery Reviews, 44(1): 35-49 (2000)), Lochmann et al. (Lochmann et al., European Journal of Pharmaceutics and Biopharmaceutics, 58: 237-251 (2004)), Dong et al. (Dong et al., Advanced Drug Delivery Reviews, 144: 133-147 (2019)), and Juliano (Juliano, Nucleic Acids Research, 44(14): 6518-6548 (2016)), all of which are incorporated herein, along with each of their references, in their entirety.

[0142] In one embodiment, the method of delivery includes one or more of the common delivery methods used to deliver drugs, including, but not limited to, injections that are vascular, extravascular, into cerebral spinal fluid, into the blood or lymph, intrathecal, oral uptake, nasal delivery or otherwise as an inhalant, and transdermal uptake.

### Nucleic Acid Vector

[0143] In certain embodiments, the method of delivery of antisense modulators described herein into a cell, an animal, or human subject, involves the use of nucleic acid vectors. Nucleic acid vectors in various embodiments are biological vehicles used for the transmission of genetic material from one location to another and can be in any format well known to a person skilled in the art. Genetic material can include, but is not limited to, DNA, RNA, mRNA, siRNA, miRNA, lncRNA, guide RNA (gRNA), or antisense oligonucleotides. These and other forms of genetic material are well known to a person of ordinary skill in the art, and are included in some embodiments herein. A nucleic acid vector can be in the form of a plasmid, cosmid, artificial chromosome, DNA or other cassette, phagemid, and the like. The genetic sequence contained within vectors can be created by DNA/RNA synthesis, and/or modified via DNA/RNA editing or splicing techniques that are known to a person who is skilled in the art. These vectors can be specific or nonspecific to a certain type of cell. In one embodiment, the nucleic acid vector is non-integrating, and otherwise known as an episomal vector (i.e., it does not integrate into the genome of the cell). In one embodiment, non-integrating vectors are useful for targeting post-mitotic cells that are no longer undergoing cell division, since as long as the episomal vector can be stably maintained, the modulator can be stably expressed. In another embodiment, the nucleic acid vector is an integrating vector. In one embodiment, integrating vectors are useful for targeting stem cells that are actively undergoing cell division, since genome integration ensures that the encoded modulator is not lost during cell division. A nucleic acid vector can be classified as a viral vector or non-viral vector, which allows for different methods of delivery into a target cell, both of which are included in some embodiments.

[0144] A viral vector comprises a sequence of nucleotides that can be delivered into a target cell via a genetically modified virus, such as a retrovirus, adenovirus, adeno-associated virus, lentivirus, pox virus, alphavirus, or herpes virus. In some embodiments, the virus can be encapsulated or attached to liposomes, polymersomes, dynamic polyconjugates, nanoparticle complexes and the like. Once introduced, the virus delivers the nucleic acid vector to the host cell as part of its natural replication cycle. The complete nucleic acid vector can be integrated into the genome of the host cell. In certain embodiments, the virus directly inserts particular nucleic acid sequences contained within the nucleic acid vector into the genome of the host cell. In other embodiments, non-integrating viral vectors can be used to introduce nucleic acids into a host cell that are not subsequently integrated into the genome.

[0145] Several methods can be used to facilitate the successful delivery of viral vectors in gene therapy, such as pseudotyping, adaptor targeting, genetic systems targeting, and others known in the art. In general, viral vectors need to be modified to facilitate successful transduction into target cells. In pseudotyping, a viral attachment protein that is compatible with the target cell but that is produced by a different virus is integrated into the viral vector. In adaptor targeting, a small molecule is developed that has strong binding affinity to both the vector and the target cell. In genetic systems targeting, the genetic incorporation of a protein or polypeptide into the vector facilitates the binding of the vector to the target cell. Viral vectors for gene therapy are further described by Waehler et al. (Waehler et al., Nature Reviews Genetics, 8:573-587 (2007)), which along with references cited therein, is incorporated by reference in its entirety and are known to a person of ordinary skill in the art.

[0146] Non-viral vectors can be delivered by any one of a number of non-viral delivery methods. Vectors modified with lipids such as phospholipid phosphatidylserine, DOTMA, DOSPA, DOTAP, DMRIE, cholesterol, DOPE, or any combination thereof, can be used to form liposomes to deliver genetic material. Vectors modified with polymers, such as poly(L-lysine), polyethylenimine, PEG, or any combination thereof, can also be used to deliver genetic material in polymersomes. In certain cases, the vector can be modified with a combination of lipid or polymer or other molecule that is known to a person of ordinary skill in the art. Other methods of delivery of nucleic acid vectors include but is not limited to the use of cell-penetrating peptides, physiologically compatible nanoparticles, dynamic polyconjugates, GalNAc, or stable nucleic acid-lipid particle formulations. In certain cases, unmodified nucleic acid vectors are taken up using natural processes for the uptake of nucleic acids by a cell, such as endocytosis. Non-viral vectors for gene therapy and certain methods of delivery are described further by Yin et al. (2014) (Yin et al., Nature Reviews Genetics, 15:541-555 (2014)), which along with reference cited therein, are incorporated by reference in its entirety and are known to a person of ordinary skill in the art.

### Analysis of Antisense Modulator Activity

[0147] The antisense modulators disclosed herein can have variable activity, for example, as defined by percent reduction of target nucleic acid (e.g., RNA) levels, percent reduction of levels of proteins encoded by target nucleic acids, or percent reduction of the activity of proteins encoded by target nucleic acids. In certain embodiments, reductions in FNIP1 and/or FNIP2 RNA levels, which include, but are not limited to, RNA from the transcription of the FNIP1 and/or FNIP2 genes, and RNA used for FNIP1 and/or FNIP2 protein translation, are indicative of inhibition of FNIP1 and/or FNIP2 expression. In particular embodiments, reductions in levels of one or more FNIP1 and/or FNIP2 transcripts disclosed by SEQ ID NOs: 1-15 herein, is indicative of inhibition of FNIP1 and/or FNIP2 expression. In some embodiments, reductions in levels of FNIP1 and/or FNIP2 protein is indicative of inhibition of FNIP1 and/or FNIP2 expression. In particular embodiments, reductions in levels of one or more FNIP1 and/or FNIP2 proteins that are translation products of one or more FNIP1 and/or FNIP2 transcripts disclosed by SEQ ID NOs: 1-15 herein, is indicative of inhibition of FNIP1 and/or FNIP2 expression. In other embodiments, reductions in activity of FNIP1 and/or FNIP2 proteins that are translation products of one or more FNIP1 and/or FNIP2 transcripts disclosed by SEQ ID NOs: 1-15 herein is indicative of inhibition of FNIP1 and/or FNIP2 expression.

[0148] The antisense modulators disclosed herein can also have variable activity, for example, as defined by percent increase of target nucleic acid (e.g., RNA) levels, percent increase of levels of proteins encoded by target nucleic acids, or percent increase of the activity of proteins encoded by target nucleic acids. In certain embodiments, increases in FNIP1 and/or FNIP2 RNA levels, which include, but are not limited to, RNA from the transcription of the FNIP1 and/or FNIP2 genes, and RNA used for FNIP1 and/or FNIP2 protein translation, are indicative of an increase of FNIP1 and/or FNIP2 expression. In particular embodiments, increases in levels of one or more FNIP1 and/or FNIP2 transcripts disclosed by SEQ ID NOs: 1-15 herein, is indicative of an increase of FNIP1 and/or FNIP2 expression. In some embodiments, an increase in levels of FNIP1 and/or FNIP2 protein is indicative of an increase of FNIP1 and/or FNIP2 expression. In particular embodiments, an increase in levels of one or more FNIP1 and/or FNIP2 proteins that are translation products of one or more FNIP1 and/or FNIP2 transcripts disclosed by SEQ ID NOs: 1-15 herein, is indicative of an increase of FNIP1 and/or FNIP2 expression. In other embodiments, an increase in activity of FNIP1 and/or FNIP2 proteins that are translation products of one or more FNIP1 and/or FNIP2 transcripts disclosed by SEQ ID NOs: 1-15 herein is indicative of an increase of FNIP1 and/or FNIP2 expression.

[0149] Activity of FNIP1 and/or FNIP2 refers to one or more activities that are normally carried out by FNIP1 and/or FNIP2 transcripts or proteins, such as, for example, regulation of FLCN expression and/or activity, regulation of TDP-43, and regulation of various pathways such as the Rag-mediated nutrient sensing pathway, the VHL-HIF-VEGF pathway, the TGF-β pathway, the autophagy pathway, the cell cycle, and RhoA signaling etc. Activity of FNIP1 and/or FNIP2 also refers to one or more activities that are normally carried out by genes or pathways that are associated with FNIP1 and/or FNIP2, which includes for example, regulation of autophagy, shuttling of TDP-43 from the nucleus to the cytoplasm, regulation of cell-cell adhesion, regulation of nutrient sensing pathways, regulation of the mTOR pathway, regulation of the AMPK pathway, regulation of cell cycle, regulation of hypoxic response, regulation of angiogenesis, regulation of glycolysis, or regulation of other signaling or metabolic pathways.

[0150] In certain embodiments, the antisense modulators disclosed herein can selectively target and decrease the levels or activity of one or more particular FNIP1 and/or FNIP2 transcript variants and the proteins encoded by them, such decrease in levels or activity of one or more FNIP1 and/or FNIP2 transcript variants or proteins being indicative of a decrease of FNIP1 and/or FNIP2 expression or activity. In yet other embodiments, certain phenotypic changes produced as a result of administration of an antisense modulator to cells, animals, or human subjects, can be indicative of decrease of FNIP1 and/or FNIP2 expression or activity, for example, increased cell survival, increased levels of HIF-1α, or decreased levels of TDP-43 aggregates in the cytoplasm. In other embodiments, the antisense modulators disclosed herein can selectively target and increase the levels or activity of one or more particular FNIP1 and/or FNIP2 transcript variants and the proteins encoded by them, such increase in levels or activity of one or more FNIP1 and/or FNIP2 transcript variants or proteins being indicative of an increase in FNIP1 and/or FNIP2 expression or activity. In yet other embodiments, certain phenotypic changes produced as a result of administration of an antisense modulator to cells, animals, or human subjects, can be indicative of an increase in FNIP1 and/or FNIP2 expression or activity, for example, decrease in cell proliferation, decrease in angiogenesis, etc. In certain embodiments, the methods and compositions described herein for the analysis of the activity of an antisense modulator are applied directly or in modified form to the analysis of the activity of other types of modulators, such as, for example, other oligonucleotide modulators, antibody modulators, peptide modulators, and small molecule modulators.

[0151] In certain embodiments, the modulation of expression or activity of FNIP1 and/or FNIP2 transcripts or proteins can lead to changes in the expression or activity of other genes, mRNA, proteins, or pathways in the cell, wherein such changes are indicative of an increase or decrease of FNIP1 and/or FNIP2 expression or activity. FNIP1 and/or FNIP2 positively regulates the expression or activity of FLCN. Thus, in some embodiments, a decrease in FLCN expression or activity is indicative of inhibition of FNIP1 and/or FNIP2. Furthermore, changes in FLCN-regulated genes, mRNA, proteins, or pathways in the cell can be indicative of changes in FNIP1 and/or FNIP2 expression or activity. The FNIP1-FLCN and/or FNIP2-FLCN complex regulates the mTORC1 and AMPK pathways in a cell type-dependent manner, which is described by Khabibullin et al. (Khabibullin et al., Physiol Rep, 2(8): e12107 (2014)), which along with reference cited therein, are incorporated herein by reference in its entirety. Thus, in some embodiments, an increase in mTOR signaling or activation of the mTOR pathway in certain cell types, for example SAEC cells, is indicative of a decrease of FNIP1 and/or FNIP2 expression or activity, and vice versa. In some embodiments, a decrease in mTOR signaling or inhibition of the mTOR pathway in certain cell types, for example HBE cells, is indicative of a decrease of FNIP1 and/or FNIP2 expression or activity, and vice versa. In some embodiments, an increase in AMPK signaling or activity of the AMPK pathway in certain cell types is indicative of a decrease in FNIP1 and/or FNIP2 expression or activity, and vice versa. In other embodiments, a decrease in AMPK signaling or activity of the AMPK pathway in certain cell types is indicative of a decrease of FNIP1 and/or FNIP2 expression or activity, and vice versa. FNIP1 and/or FNIP2 is a negative regulator of PPARGC1A/PGC1α and mitochondrial biogenesis, as described by Hasumi et al. (Hasumi et al., PNAS 112(13): E1624-E1631 (2015)). Thus, in some embodiments, an increase in expression or activity of PPARGC1A/PGC1α or an increase in mitochondrial biogenesis, are indicative of a decrease of FNIP1 and/or FNIP2 expression or activity, and vice versa. The FNIP1-FLCN and/or FNIP2-FLCN complex inhibits the activity of TFEB and TFE3, which are transcription factors for autophagy genes, as described in Petit et al. (Petit et al., J Cell Biol., 202(7): 1107-22 (2013)), which along with reference cited therein, are incorporated herein by reference in its entirety. Thus, in some embodiments, an increase in activity of TFEB or TFE3 are indicative of a decrease of FNIP1 and/or FNIP2 expression or activity, and vice versa. Furthermore, FLCN can inhibit the induction of autophagy by inhibiting the accumulation of LC3B, and promoting the accumulation of LC3C, as described by Bastola et al. (Bastola et al., PLoS ONE 8(7), e70030 (2013)), which along with reference cited therein, are incorporated herein by reference in its entirety. Thus, in some embodiments, an increase in levels of LC3B, or a decrease in levels of LC3C, or an increase in autophagy activity, can be indicative of a decrease of FNIP1 and/or FNIP2 expression or activity, and vice versa. In some cases, FLCN can promote autophagy by interaction with GABARAP and ULK1, as described in Dunlop et al. (Dunlop et al., Autophagy, 10(10): 1749-1760 (2014)), which along with reference cited therein, are incorporated herein by reference in its entirety. Thus, in some embodiments, a decrease in autophagic flux can be indicative of a decrease of FNIP1 and/or FNIP2 expression or activity, and vice versa. Changes to other genes, mRNA, proteins, or pathways in the cell that result from inhibiting the expression or activity of FNIP1 and/or FNIP2 are well known to a person skilled in the art and are incorporated herein as indicative of inhibition of FNIP1 and/or FNIP2 expression or activity.

### Analysis of RNA Levels

[0152] In certain embodiments, the inhibition of FNIP1 and/or FNIP2 expression by a modulator, such as an antisense modulator, can be assessed by measuring the decrease in levels of FNIP1 and/or FNIP2 RNA transcripts. In other embodiments, the increase of FNIP1 and/or FNIP2 expression by a modulator, such as an antisense modulator, can be assessed by measuring the increase in levels of FNIP1 and/or FNIP2 RNA transcripts. RNA analysis can be carried out on poly(A)+mRNA or total cellular RNA. Methods of RNA isolation are well known in the art and include, for example, using the TRIZOL Reagent (Invitrogen, Carlsbad, Calif.) according to the manufacturer's recommended protocols, or using an RNA extraction kit (Qiagen) etc. The target RNA levels can be quantified using methods well known in the art and include, for example, Northern blot analysis, competitive polymerase chain reaction (PCR), or reverse transcription followed by quantitative real-time PCR using the ABI PRISM 7600, 7700, or 7900 Sequence Detection System (PE-Applied Biosystems, Foster City, Calif.) according to the manufacturer's instructions.

[0153] Prior to quantitative real-time PCR, the isolated RNA first undergoes a reverse transcription reaction to produce complementary DNA (cDNA), which is then used as the substrate for the real-time PCR amplification reaction. Reagents for reverse transcription and real-time PCR can be obtained commercially (e.g., Invitrogen, Carlsbad, Calif.). The reverse transcription reaction and real-time PCR reactions can be performed sequentially in the same sample well or in different sample wells. The levels of a target gene or RNA that are obtained by real-time PCR can be normalized using either total RNA levels quantified by, for example, RIBOGREEN (Invitrogen, Carlsbad, Calif.), or normalized using the expression level of a gene whose expression in the cell is more or less stable, such as cyclophilin A. Methods of RNA quantification using RIBOGREEN are described in Jones et al. (Jones et al., Analytical Biochemistry, 265: 368-374 (1998)), which together with the references cited therein, are incorporated herein in its entirety. A CYTOFLUOR 4000 instrument (PE Applied Biosystems) can be used to measure RIBOGREEN fluorescence. The expression levels of cyclophilin A can be quantified by real-time PCR within the same well as that used for quantifying the levels of target RNA (i.e., by performing a multiplex reaction) or by running it in a separate well.

[0154] Probes and primers that hybridize to a target nucleic acid encoding FNIP1 and/or FNIP2 can be designed using methods that are well known in the art, and can include the use of software, such as, for example, PRIMER EXPRESS Software (Applied Biosystems, Foster City, Calif.).

### Analysis of Protein Levels

[0155] In certain embodiments, the inhibition of FNIP1 and/or FNIP2 expression by a modulator, such as an antisense modulator, can be assessed by measuring the decrease in levels of FNIP1 and/or FNIP2 protein. In other embodiments, the increase of FNIP1 and/or FNIP2 expression by a modulator, such as an antisense modulator, can be assessed by measuring the increase in levels of FNIP1 and/or FNIP2 protein. Several methods for quantifying or measuring protein levels of FNIP1 and/or FNIP2 are well known in the art, such as Western blot analysis, enzyme-linked immunosorbent assay (ELISA), immunoprecipitation, immunocytochemistry, fluorescence activated cell sorting (FACS), immunohistochemistry, protein activity assays, quantitative protein assays, bicinchoninic acid assay (BCA assay) also known as the Smith assay, and the like. Antibodies that are specific for a target protein, such as FNIP1 and/or FNIP2, can be generated using conventional monoclonal or polyclonal antibody generation methods well known in the art, or identified and obtained commercially from a variety of sources, such as the MSRS catalog of antibodies (Aerie Corporation, Birmingham, Mich.). Antibodies for the detection of mouse, rat, monkey, and human FNIP1 and/or FNIP2 are available commercially.

### In Vitro Testing of Antisense Modulators

[0156] In certain embodiments, the antisense modulators described herein can be administered to cultured cells in vitro to evaluate their effects on the expression of target gene(s) or other phenotypes. In certain embodiments, the antisense modulators described herein can be administered to cultured cells in vitro to evaluate the effects of antisense modulators on FNIP1 and/or FNIP2 expression or activity. In certain embodiments, the antisense modulators provided herein can be administered to cultured cells in vitro to evaluate their effects on one or more phenotypes, such as, for example, cell survival, cell morphology, or levels of TDP-43 aggregates in the cytoplasm. In certain embodiments, other modulators described herein, such as, for example, other oligonucleotide modulators, antibody modulators, peptide modulators, or small molecule modulators can be administered to cultured cells in vitro to evaluate their effects on FNIP1 and/or FNIP2 expression or activity, or one or more phenotypes, such as, for example, cell survival, cell morphology, or levels of TDP-43 aggregates in the cytoplasm.

[0157] In some embodiments, the cultured cells can have an animal origin, for example, Sf9 insect cells, Chinese hamster ovary (CHO) cells, rat cell lines, mouse cell lines, or non-human primate cell lines etc. In other embodiments, the cultured cells can have a human origin, for example, human embryonic kidney-derived epithelial cells (HEK293 or HEK293T), HeLa cells, human neural cell lines, ReN-VM cells, human fibroblast cell lines, HepG2 cells, Hep3B cells, and primary hepatocytes etc. Examples of cultured cells include those that are described in the catalogs of commercial vendors, such as, for example, Clonetics Corporation, Walkersville, Md.; American Type Culture Collection, Manassas, Va.; Zen-Bio, Inc., Research Triangle Park, N.C. etc., and are incorporated by reference herein. Such cells are cultured according to the vendor's instructions using commercially available reagents (e.g. Invitrogen Life Technologies, Carlsbad, Calif.). Cells can be cultured and tested in multi-well plates, for example, 24-well, 48-well, 96-well, 384-well plates etc.

[0158] In certain embodiments, the cultured cells are human induced pluripotent stem cell (iPSC) lines or other human stem cell lines. In certain embodiments, the cultured cells are differentiated cells that are derived from iPSC or other stem cell lines using methods that are well known in the art. Such differentiated cells include but are not limited to motor neuron cells, upper motor neuron cells, lower motor neuron cells, astrocyte cells, glial cells, microglial cells, corticol neuron cells, endothelial cells, dopaminergic neuron cells, neural stem cells, oligodendrocyte cells, other brain cells, cardiomyocytes, other cardiac cells, skeletal muscle cells, vascular endothelial or smooth muscle cells, hepatocytes, other liver cells, pancreatic (3-cells, other kidney cells, lung cells etc. In some embodiments, the modulators, including antisense modulators, described herein are administered to more than one cell type that are cultured together (i.e., co-culture).

[0159] In one embodiment, the human iPSCs or other stem cells are derived from healthy individuals. In another embodiment, the human iPSCs or other stem cells are derived from individuals that are at risk of, or suspected to be afflicted with, or diagnosed with a neuromuscular or neurodegenerative disease, including but not limited to ALS, Alzheimer's disease, retinal degeneration diseases such as age-related macular degeneration (AMD), and other TDP-43 proteinopathies disclosed herein etc. In some embodiments, the human iPSCs or other stem cells are derived from individuals with familial ALS, including but not limited to individuals with known pathogenic mutations in ALS genes such as C9orf72, SOD1, STMN2, NEK1, TARDBP, FUS, VCP, OPTN, SQSTM1, UBQLN2, hnRNPA1, MATR3 etc. In some embodiments, the human iPSCs or other stem cells are derived from individuals with sporadic ALS, including those with and without known ALS-causing mutations. In yet other embodiments, human iPSCs or other stem cells can be modified in the lab to reproduce or mimic the diseased condition, for example, by the introduction of disease-causing mutations in known disease-relevant genes using genetic engineering techniques such as homologous recombination, CRISPR/Cas9, TALENs or zinc-finger nucleases, etc. Such iPSC or stem cell lines are termed isogenic disease cell lines. In the case of ALS, examples of isogenic cell lines include but are not limited to those containing known disease-causing mutations in ALS genes such as SOD1, TARDBP, and others (Hor et al., bioRxiv 713651 (2019)). In other embodiments, the human iPSCs or other stem cells are derived from individuals that are at risk of, or suspected to be afflicted with, or diagnosed with one or more diseases, including but not limited to oxidative stress, obesity, anemia, ischemic disease, inflammatory disease, VHL disease, BHD syndrome, spontaneous pneumothorax, or cancer.

[0160] The use of cultured cells of human origin to evaluate the effects of modulators, including antisense modulators, produces results with higher relevance to the human condition compared to the use of animal models, which often fail to recapitulate important aspects of the disease due to a lack of conservation of gene targets, pathways, physiology and systems between the animal model and humans (van Damme et al., Disease Models & Mechanisms, 10, 537-549 (2017)). Consequently, promising therapies that show a positive effect in preclinical studies using ALS animal models (e.g., SOD1 transgenic mice) have all failed to translate to success in human clinical trials (Mitsumoto et al., Lancet Neurology, 13: 1127-38 (2014)). Moreover, the use of human iPSCs or other stem cells derived from disease patients with different profiles and backgrounds (e.g., sex, age, ethnicity, disease sub-type, presence or absence of known ALS mutations, etc.) allows for the evaluation of the effects of modulators, including antisense modulators, described herein on a broad spectrum of patients.

[0161] Described herein and in the Examples are methods for the administration of antisense modulators to cultured cells, which can be modified appropriately for the administration of other modulators such as, for example, other oligonucleotide modulators, antibody modulators, peptide modulators, or small molecule modulators. In general, antisense modulators are administered to cultured cells when the cells are approximately 60-80% confluent. Transfection reagents that are commonly used to introduce antisense modulators into cultured cells are well known in the art and include, for example, LIPOFECTAMINE or LIPOFECTIN (Invitrogen, Carlsbad, Calif.). Antisense modulators are mixed with LIPOFECTAMINE or LIPOFECTIN in OPTI-MEM 1 reduced serum medium (Invitrogen, Carlsbad, Calif.) to achieve the desired concentration of antisense modulator and a LIPOFECTAMINE or LIPOFECTIN concentration that typically ranges from 2-12 μg/mL per 100 nM of antisense modulator. Another technique that is commonly used to introduce antisense modulators into cultured cells includes electroporation. When LIPOFECTAMINE or LIPOFECTIN is used, the typical concentration range of antisense modulators administered to cultured cells is 1 nM-300 nM. When electroporation is used, the typical concentration range of antisense modulators administered to cultured cells is 625 nM-20,000 nM.

[0162] Following administration of antisense modulators to cultured cells, the cells are typically assayed 16-72 hours post-treatment. The cultured cells can be fixed, stained with antibodies and observed by microscopy to measure phenotypes such as cell survival, cell morphology and the levels of TDP-43 aggregates in the cytoplasm. The cultured cells can also be harvested to measure the levels of RNA or protein levels of target nucleic acids using methods known in the art and described herein. In general, when treatments are performed in multiple replicates, the data are presented as the average of the replicate treatments. The concentration of antisense modulator used can vary from cell line to cell line. Methods to determine the optimal concentrations of an antisense modulator for a particular cell line are well known in the art.

[0163] Methods for in vitro testing of modulators, including antisense modulators, are described in U.S. Pat. No. 10,577,604, which along with references cited therein, are incorporated herein in their entirety. Other modifications are known to those skilled in the art and are considered to be included in the embodiments herein.

### In Vivo Testing of Antisense Modulators

[0164] In certain embodiments, the antisense modulators described herein can be administered to animals (all of references of which can include humans) in vivo to evaluate their safety, effects on the expression or activity of target gene(s), and effects on other phenotypes, such as, for example, survival, motor function, respiration, behavior, body weight, etc. In certain embodiments, the antisense modulators described herein can be administered to animals in vivo to evaluate the effects of antisense modulators on FNIP1 and/or FNIP2 expression or activity. In certain embodiments, the antisense modulators provided herein can be administered to animals in vivo to evaluate the safety of the compounds. In certain embodiments, the antisense modulators can be administered to animals in vivo to evaluate the effects of antisense modulators on one or more phenotypes, such as, for example, survival, motor function, respiration, behavior, body weight, etc. In certain embodiments, other modulators described herein, such as, for example, other oligonucleotide modulators, antibody modulators, peptide modulators, or small molecule modulators can be administered to animals in vivo to evaluate their effects on FNIP1 and/or FNIP2 expression or activity, or on one or more phenotypes, such as, for example, survival, motor function, respiration, behavior, body weight, etc. Methods to measure motor function are well known in the art and include, for example, the grip strength assay, rotarod assay, walking initiation analysis, balance beam test, pole climb assay, open field performance and hindpaw footprint tests. Methods to measure respiration are well known in the art and include, for example, whole body plethysmograph, invasive resistance, and compliance measurements in the animal. In some embodiments, testing can be performed in healthy animals. In other embodiments, testing can be performed in disease animals.

[0165] In certain embodiments, modulators described herein, including antisense modulators, are formulated in a pharmaceutically acceptable diluent, such as phosphate-buffered saline, for administration to animals. Administration includes parenteral routes of administration, such as, for example, intrathecal, intraperitoneal, intravenous, and subcutaneous, etc. Methods to calculate appropriate dosages of antisense modulators and dosing frequency are well known in the art and depends upon factors such as animal body weight and route of administration. Following the administration of modulators, including antisense modulators, to the animal, the animals are monitored at defined timepoints for the expression levels of target gene(s) such as FNIP1 and/or FNIP2, and effects on other phenotypes, such as, for example, survival, motor function, respiration, behavior, body weight, etc. The levels of FNIP1 and/or FNIP2 RNA or FNIP1 and/or FNIP2 protein can be measured in different tissues from the animal, such as, for example, the CSF, plasma, brain, spinal cord, lung, liver, kidney etc., using methods known in the art and described herein.

[0166] Methods for in vivo testing of modulators, including antisense modulators, are described in U.S. Pat. No. 10,577,604, which along with each of the references cited therein, are incorporated herein in their entirety. Other modifications are known to those skilled in the art and are considered to be included in the embodiments herein.

### Other Modulators

[0167] In certain embodiments, provided herein are modulators other than antisense modulators, for example other oligonucleotide modulators (e.g., ribozyme, deoxyribozyme, or aptamers), antibody modulators, peptide modulators, small molecule modulators, and nucleic acid vectors, which can be administered to a cell, an animal, or a human subject, to modulate the expression or activity of a target polypeptide or nucleic acid. In some embodiments, provided herein are modulators other than antisense modulators, for example other oligonucleotide modulators (e.g., ribozyme, deoxyribozyme, or aptamers), antibody modulators, peptide modulators, small molecule modulators, and nucleic acid vectors, which can be administered to a cell, an animal, or a human subject, to reduce or inhibit the expression or activity of FNIP1 and/or FNIP2, in order to treat, prevent or ameliorate a disease, particularly neuromuscular or neurodegenerative diseases, such as for example, ALS, FTLD, Alzheimer's disease, retinal degeneration diseases such as age-related macular degeneration (AMD), or other TDP-43 proteinopathies; as well as oxidative stress, obesity, anemia or ischemic diseases, such as cardiovascular disease, myocardial ischemia and peripheral vascular disease. In other embodiments, provided herein are modulators other than antisense modulators, for example other oligonucleotide modulators (e.g., ribozyme, deoxyribozyme, or aptamers), antibody modulators, peptide modulators, small molecule modulators, and nucleic acid vectors, which can be administered to a cell, an animal, or a human subject, to increase the expression or activity of FNIP1 and/or FNIP2, in order to treat, prevent or ameliorate a disease such as an inflammatory disease, von Hippel-Lindau (VHL) disease, Birt-Hogg-Dube (BHD) syndrome, spontaneous pneumothorax, B cell deficiency, cardiomyopathy, as well as cancers such as fibrofolliculomas, kidney tumors, clear cell renal cell carcinoma, multilocular clear cell renal carcinoma, chromophobe renal cell carcinoma, renal oncocytic hybrid carcinoma, bladder cancer, uterine corpus endometrioid cancer, interdigitating dendritic cell sarcoma, hemangioblastomas (slow-growing tumors of the central nervous system), pancreatic neuroendocrine tumors, pheochromocytomas (noncancerous tumors of the adrenal glands), endolymphatic sac tumors, kidney cysts, lung cysts, and other diseases that are linked to loss-of-function of FNIP1 and/or FNIP2.

### Gene Therapy

[0168] In certain embodiments, provided herein are compositions and methods involving transfer of genetic material to a cell, an animal, or a human subject, in order to treat, prevent, or ameliorate a disease, otherwise referred to as gene therapy. The genetic material can be integrated into the genome (e.g., via an integrating vector or by homology-directed repair). In certain embodiments, the genetic material is not integrated into the genome (e.g., carried on a non-integrating vector). The genetic material can be administered in vivo (directly into the patient), or the genetic material can be administered ex vivo (to cultured cells taken from the patient that are subsequently transplanted back into the patient). In certain embodiments, lentiviral vectors are used for ex vivo transfer of genetic material into hematopoietic and other stem cells. In other embodiments, adeno-associated viral (AAV) vectors are used for in vivo transfer of genetic material into postmitotic cell types. In some embodiments, AAV2 or AAV9 vectors are used for in vivo transfer of genetic material into the central nervous system (CNS). Compositions and methods of gene therapy as a therapeutic method are described by Anguela and High (Anguela and High, Annual Review of Medicine, 70, 273-288 (2019)), which along with references cited therein, are incorporated herein by reference in their entirety.

[0169] One goal of gene therapy is gene augmentation, which seeks to restore normal cellular function by increasing the expression or activity of a gene. In some embodiments, if a mutation in a gene leads to a loss-of-function of the polypeptide or nucleotide sequence encoded by the gene, which leads to the disease, a modulator or additional normal functional copies of the gene can be supplied to the cell to increase the expression of the gene, in order to treat, prevent or ameliorate the disease. In some embodiments, even if the disease is not caused by, or associated with, a loss-of-function of the polypeptide or nucleotide sequence encoded by the gene, gene augmentation can still be useful to treat, prevent or ameliorate the disease. Another goal of gene therapy is gene suppression, which seeks to restore cellular function by reducing the expression or activity of a gene. In some embodiments, if a mutation in a gene leads to a gain-of-function of the polypeptide or nucleotide sequence encoded by the gene, which leads to the disease, a modulator to suppress the expression or activity of the gene can be supplied to the cell to treat, prevent or ameliorate the disease. In some embodiments, even if the disease is not caused by, or associated with, a gain-of-function of the polypeptide or nucleotide sequence encoded by the gene, gene suppression can still be useful to treat, prevent or ameliorate the disease.

[0170] In certain embodiments, gene therapy comprises genome editing, which is the modification of the genome of the cell, for example, by removing pathogenic mutations or introducing beneficial mutations to one or more genetic features, in order to restore normal cellular function. In one embodiment, genome editing relies on an enzyme or enzyme complex, such as TALENs, CRISPR/Cas, zinc-finger nucleases (ZFNs), meganucleases, or other endonuclease system. The enzyme or enzyme complexes used for genome editing described here are non-exhaustive and other enzyme or enzyme complexes used for genome editing are well known to a person of ordinary skill in the art and are included in various embodiments. For example, genome editing as a therapeutic approach is described by Ho et al. (Ho B. X. et al. International Journal of Molecular Sciences 19: 2721 (2018)), which along with references cited therein, are incorporated herein by reference in their entirety.

[0171] The typical modus operandi of genome editing involves the inserting, replacing, or deleting of certain nucleotide sequences in the genome of an organism, often through the introduction of an enzyme or enzyme complex and an exogenous nucleotide sequence. In some embodiments, the enzyme or enzyme complex facilitates the genome editing process by creating site-specific double-stranded breaks in the genome. In certain embodiments, homology directed repair, such as homologous recombination, is used by the cell to replace parts of the genome using an exogenous sequence of nucleotides, which is often introduced into the cell via a nucleic acid vector. Homology directed repair uses the natural enzymatic mechanisms within the cell to repair double-stranded breaks in the genome through the use of a homologous template. By introducing an exogenous sequence of nucleotides comprising the desired modified nucleotide sequence flanked by nucleotide sequences that are homologous to the genomic nucleic acid sequence at or around the double-stranded break, the cell can utilize this exogenous sequence of nucleotides as the homologous template for the homology directed repair process, thereby inserting, modifying, or deleting the original sequence of nucleotides present at or around the double-stranded break. In other embodiments, non-homologous end-joining is used by the cell to directly repair double-stranded breaks in the genome without using a homologous template. During the non-homologous end-joining process, insertions or deletions are introduced into the genome, which in the case of protein-coding genes often leads to a change in the reading frame or introduction of a premature stop codon, thus rendering the gene non-functional.

[0172] In one embodiment, two double-stranded breaks are introduced at the region where genome editing is desired to increase the efficiency of homology-directed repair or non-homologous end-joining. In another embodiment, more than one genomic region is targeted for homology-directed repair or non-homologous end-joining by introducing more than one double-stranded break simultaneously at different genomic locations in the cell. In yet another embodiment, a single-stranded break (that is similarly capable of stimulating homology-directed repair or non-homologous end-joining) is introduced in the genome using an engineered endonuclease, instead of a double-stranded break, in order to reduce toxicity to the cell. In certain embodiments, genome editing can be achieved without single-stranded breaks, double-stranded breaks or using a homologous template. This can be achieved by using a catalytically impaired endonuclease (e.g., Cas9) fused to an engineered reverse transcriptase, which is programmed with a prime editing guide RNA (pegRNA) that both encodes the desired edits and specifies the target site, otherwise known as prime editing. Prime editing is described by Anzalone et al. (Anzalone et al., Nature, 576 (7785), 149-157 (2019)), which along with references cited therein, are incorporated herein by reference in their entirety.

[0173] In certain embodiments, genome editing involves making integrative changes (e.g., insertions, deletions or modifications) to the DNA sequence in the chromosome of the cell. This can be achieved by using an endonuclease that can recognize and cleave DNA sequences, for example, Cas9 and Cas12a (also known as Cpf1). In other embodiments, genome editing involves making non-integrative changes (e.g., insertions, deletions or modifications) to the RNA sequence in the cell. This can be achieved by using an endonuclease that can recognize and cleave RNA sequences, for example, Cas13. RNA-targeting CRISPR-Cas endonucleases and systems are described by Burmistrz et al. (Burmistrz et al., Int. J. Mol. Sci. 21, 1122 (2020)), which along with references cited therein, are incorporated herein by reference in their entirety.

[0174] In another embodiment, genome editing can comprise the correction of at least one point mutation using an engineered endonuclease that is catalytically inactive but able to recognize and bind to a specific sequence of DNA containing the point mutation, wherein the engineered endonuclease is coupled to a base editing enzyme, and correcting the point mutation via the activity of the coupled base editor. In one embodiment, the catalytically inactive endonuclease does not introduce a double-stranded break. Base editing can be used to introduce any of the four transition mutations, C to T, G to A, A to G, and T to C. Specifically, for DNA, the cytosine base editor (CBE) can alter a C-G base pair into a T-A base pair, while the adenine base editor (ABE) can alter an A-T base pair into a G-C pair. In another embodiment, genome editing can comprise the correction of at least one point mutation using an engineered endonuclease that is catalytically inactive but able to recognize and bind to a specific sequence of RNA containing the point mutation. For RNA, the RNA base editor (RBE) can convert adenine (A) to inosine (I). CRISPR/Cas-mediated base editing is described by Molla and Yang (Molla K. A. and Yang Y., Trends in Biotechnology, 37(10), 1121-1142, (2019)), and Grunewald et al. (Grunewald et al., Nature Biotechnology, 38, 861-864 (2020)), which along with references cited therein, are incorporated herein by reference in their entirety.

[0175] In yet another embodiment, genome editing can comprise using a catalytically inactive endonuclease linked to at least one epigenetic modification enzyme to effect a change to the epigenetic state of the genome. For example, catalytically inactive Cas9 (CRISPR endonuclease) can be coupled to epigenetic modification enzymes including but not limited to KRAB, DNMT3A, LSD1, p300, TET, VP64, SunTag-epieffector, SAM-epieffector, and the like. In one embodiment, the catalytically inactive endonuclease is coupled to activator and/or repressor domains to effect a change in the expression of at least one target gene. Some examples that are known to a skilled person in the art include CRISPR interference (CRISPRi) and CRISPR activation (CRISPRa). CRISPR/Cas-mediated epigenetic methods are described in Xie et al. (Xie et al., Stem Cells International, Article ID 7834175 (2018)), which along with references cited therein, are incorporated herein by reference in their entirety.

[0176] In certain embodiments, provided herein are compositions and methods of gene therapy to modulate the expression or activity of FNIP1 and/or FNIP2. In a preferred embodiment, provided herein are compositions and methods of gene therapy to decrease or inhibit the expression or activity of FNIP1 and/or FNIP2. In some embodiments, provided herein are compositions and methods of gene therapy to decrease the expression or activity of FNIP1 and/or FNIP2, in order to either reduce the levels of TDP-43 aggregates in the cytoplasm, or increase the levels of functional TDP-43 in the nucleus, or achieve a combination of both, thereby treating, preventing or ameliorating a disease, particularly a neuromuscular or neurodegenerative disease, such as ALS, FTLD, Alzheimer's disease, retinal degeneration diseases such as age-related macular degeneration (AMD), or other TDP-43 proteinopathies. In other embodiments, provided herein are compositions and methods of gene therapy to decrease the expression or activity of FNIP1 and/or FNIP2, in order to increase the activity of the HIF1α and/or VEGF pathways to promote angiogenesis, thereby treating, preventing or ameliorating a neuromuscular or neurodegenerative disease, such as ALS, FTLD, Alzheimer's disease, retinal degeneration diseases such as age-related macular degeneration (AMD), or other TDP-43 proteinopathy, as well as anemia or ischemic diseases such as cardiovascular disease, myocardial ischemia and peripheral vascular disease. In some embodiments, provided herein are compositions and methods of gene therapy to decrease the expression or activity of FNIP1 and/or FNIP2, in order to decrease the expression or activity of FLCN, which can be used to treat, prevent or ameliorate diseases such as oxidative stress or obesity.

[0177] In yet other embodiments, provided herein are compositions and methods of gene therapy to increase the expression or activity of FNIP1 and/or FNIP2. In some embodiments, provided herein are compositions and methods of gene therapy to increase the expression or activity of FNIP1 and/or FNIP2, in order to decrease the activity of pro-inflammatory pathways, thereby treating, preventing or ameliorating inflammatory diseases. In other embodiments, provided herein are compositions and methods of gene therapy to increase the expression or activity of FNIP1 and/or FNIP2, in order to rescue the loss-of-function in the FNIP, FLCN or VHL pathways, thereby treating, preventing or ameliorating a disease such as von Hippel-Lindau (VHL) disease, Birt-Hogg-Dube (BHD) syndrome, spontaneous pneumothorax, B cell deficiency, cardiomyopathy, as well as cancers such as fibrofolliculomas, kidney tumors, clear cell renal cell carcinoma, multilocular clear cell renal carcinoma, chromophobe renal cell carcinoma, renal oncocytic hybrid carcinoma, bladder cancer, uterine corpus endometrioid cancer, interdigitating dendritic cell sarcoma, hemangioblastomas, pancreatic neuroendocrine tumors, pheochromocytomas, endolymphatic sac tumors, kidney cysts, lung cysts, and other diseases that are linked to loss-of-function of FNIP1 and/or FNIP2. In one embodiment, genome editing is used to insert, delete, or modify DNA sequences associated with FNIP1 and/or FNIP2, such as sequences described by SEQ ID NOs: 1-15. In one embodiment, genome editing is used to insert, delete or modify RNA sequences associated with FNIP1 and/or FNIP2, such as sequences described by SEQ ID NOs: 1-15. Genome editing via enzymes or enzyme complexes and their methods of delivery can be produced by any number of methods known to a person who is skilled in the art, which are incorporated herein (see below for specific methods).

### Nucleic Acid Vector

[0178] In one embodiment, the modulator comprises a nucleic acid vector. In one embodiment, the nucleic acid vector can encode for the modulator of choice, or a nucleobase sequence that includes the modulator of choice, or a nucleobase sequence complementary to the modulator of choice, wherein the modulator of choice is, for example, a siRNA, miRNA, lncRNA, gRNA, an antisense oligonucleotide, or a gene. The modulator, or a nucleobase sequence containing the modulator, or a nucleobase sequence complementary to the modulator, can be expressed following delivery of the nucleic acid vector into a target cell. The terms vector and nucleic acid vector herein are used interchangeably.

[0179] In some embodiments, the nucleic acid vector encodes for one or more functional copies of the gene of interest, such as FNIP1 and/or FNIP2. The additional copies of FNIP1 and/or FNIP2 are expressed in the cell to increase the levels of FNIP1 and/or FNIP2 in the cell. In certain embodiments, the nucleic acid vector encodes for a modulator that is expressed to form an activator. The activator targets FNIP1 and/or FNIP2 nucleic acids or polypeptides to increase the expression or activity of FNIP1 and/or FNIP2. In some embodiments, the activator targets DNA sequences encoding FNIP1 and/or FNIP2, or DNA sequences that regulate the expression of FNIP1 and/or FNIP2, and increases transcription of the FNIP1 and/or FNIP2 gene to mRNA. In another embodiment, the activator targets the FNIP1 and/or FNIP2 mRNA transcribed from the gene and increases translation of FNIP1 and/or FNIP2 mRNA into the polypeptide. In a preferred embodiment, the nucleic acid vector encodes for a modulator that is expressed to form an inhibitor. The inhibitor targets the polypeptide of interest, such as FNIP1 and/or FNIP2, and inhibits or reduces the expression or activity of FNIP1 and/or FNIP2. In some embodiments, the inhibitor targets DNA sequences encoding FNIP1 and/or FNIP2, or DNA sequences that regulate the expression of FNIP1 and/or FNIP2, and inhibits or reduces transcription of the FNIP1 and/or FNIP2 gene to mRNA. In some embodiments, the inhibitor targets the FNIP1 and/or FNIP2 mRNA transcribed from the gene and inhibits or reduces translation of FNIP1 and/or FNIP2 mRNA into the polypeptide.

[0180] In another embodiment, the nucleic acid vector encodes for any of the modulator embodiments described herein. In certain embodiments, the nucleic acid vector is modified to enable a viral delivery method, such as pseudotyping, adaptor targeting, or genetic systems targeting, described herein. In other embodiments, the nucleic acid vector is modified to enable a non-viral delivery method described herein. In one embodiment, the nucleic acid vector for non-viral delivery is a minimized DNA vector. In one embodiment, the minimized DNA vector lacks antibiotic resistance genes that are typically present in plasmid DNA vectors. Minimized DNA vectors have the advantages of high transfection efficiency and high production yields over regular plasmid DNA. Furthermore, the lack of antibiotic resistance genes helps to reduce the risk of spread of antibiotic resistance genes in the environment. In one embodiment, the minimized DNA vector is a minicircle, wherein sequences of bacterial origin such as the origin of replication are removed. In one embodiment, the minimized DNA vector is a minivector, which can be smaller than a minicircle. Various advances in the design of non-viral minimized DNA vectors, as well as methods of production and use are described in Hardee et al. (Hardee et al., Genes, 8, 65 (2017)), which together with references cited therein, are incorporated herein in their entirety. Nucleic acid vectors and their methods of delivery (e.g., modified virus) can be produced by any number of methods known to a person who is skilled in the art (see below for specific methods).

### Ribozyme or Deoxyribozyme

[0181] In some embodiments, the modulator can be a therapeutic ribozyme or deoxyribozyme.

[0182] A ribozyme or deoxyribozyme in various embodiments can be in any format well known to a person skilled in the art. Ribozymes and deoxyribozymes are sequences of nucleotides (e.g., RNA and DNA sequences, respectively) with enzymatic properties. Ribozymes and deoxyribozymes have been developed to target other molecules, such as RNA introduced by viruses. The enzymatic properties of ribozymes and deoxyribozymes can be used to catalyze, for example, the ligation or cleavage of RNA or DNA via hydrolysis or transesterification of the phosphate groups of the RNA or DNA molecule. Other uses of ribozymes and deoxyribozymes can include catalysis of peptide bonds, as is commonly found within ribosomes. In some cases, the ribozyme or deoxyribozyme activity can be catalyzed by the presence of one or more metal ions. In certain cases, ribozymes or deoxyribozymes can have the ability to self-synthesize or self-splice. A more detailed description of ribozymes and their therapeutic applications is given by Mulhbacher et al. (Mulhbacher et al., Current Opinion in Pharmacology, 10:551-556 (2010)). The Mulhbacher et al. reference, and references cited therein, are incorporated herein by reference in its entirety.

[0183] In some embodiments, a ribozyme or deoxyribozyme modulator is used to modulate the translation of mRNA of a target genetic sequence, such as FNIP1 and/or FNIP2. In some embodiments, a ribozyme or deoxyribozyme modulator is used to inhibit or decrease the expression or activity of FNIP1 and/or FNIP2. In other embodiments, a ribozyme or deoxyribozyme modulator is used to increase the expression or activity of FNIP1 and/or FNIP2.

[0184] In certain embodiments, a ribozyme or deoxyribozyme modulator is chemically attached to a large molecule or scaffold, creating a modulator-scaffold molecular complex. The modulator-scaffold molecular complex can enable additional functionality such as increased activity or efficacy of the modulator's enzymatic activity, improve the modulator's half-life and stability, or enable detection, tracing, or other diagnostic or therapeutic functionality.

[0185] In other embodiments, a ribozyme or deoxyribozyme modulator is chemically modified to increase activity or efficacy of the modulator's enzymatic activity, improve the modulator's half-life and stability, or enable detection, tracing, or other diagnostic or therapeutic functionality. In one embodiment, a ribozyme or deoxyribozyme modulator is chemically modified in the 2′ position of its constituent ribose.

[0186] Ribozymes or deoxyribozymes can be produced by any number of methods known to a person who is skilled in the art (see below for specific methods).

### Aptamer

[0187] In one embodiment, the modulator can be a therapeutic aptamer. A therapeutic aptamer can be an oligonucleotide aptamer, an oligopeptide aptamer, or a polypeptide aptamer.

[0188] Aptamers in various embodiments can be in any format well known to a person skilled in the art. Aptamers are oligonucleotide, oligopeptide, or polypeptide molecules engineered to have binding specificity to a target molecule of choice, often through the influence of higher-level structural factors.

[0189] In certain embodiments, the aptamer modulator is integrated into a larger nucleotide or peptide scaffold. The scaffold can enable additional functionality such as increased activity or efficacy of the modulator, promoting an immunological response, detection or tracing, increased half-life and stability, or other diagnostic or therapeutic functionality. In some embodiments, the scaffold is a peptide comprising one of the following: a monobody, an anticalin, a polypeptide with a Kunitz domain, an avimer, a knottin, a fynomer, or an atrimer.

[0190] In other embodiments, the aptamer modulator is integrated into a ribozyme, deoxyribozyme, or enzyme to form an aptamer-zyme complex. The aptamer-zyme complex can have additional functionality or specificity towards a targeted polypeptide or nucleotide sequence.

[0191] In some embodiments, the aptamer is an oligonucleotide chemically modified to increase activity or efficacy of the modulator's enzymatic activity, improve the modulator's half-life and stability, detection or tracing, or other diagnostic or therapeutic functionality. A list of common chemical modifications in oligonucleotide aptamers is described by Dunn et al. (Dunn et al., Nature Reviews Chemistry, 1(10):0076 (2017)). The Dunn et al. reference, and references cited therein, is incorporated by reference in its entirety and is known to a person of ordinary skill in the art.

[0192] In certain embodiments, a therapeutic aptamer is used to modulate the expression or activity of a target genetic sequence or protein, such as FNIP1 and/or FNIP2. In some embodiments, a therapeutic aptamer is used to inhibit or decrease the expression or activity of FNIP1 and/or FNIP2. In other embodiments, a therapeutic aptamer is used to increase the expression or activity of FNIP1 and/or FNIP2. Aptamers can be produced by any number of methods known to a person who is skilled in the art (see below for specific methods, such as in vitro selection).

### Antibody and Related Protein

[0193] In one embodiment, the modulator can be a therapeutic protein or polypeptide. A therapeutic protein can be an antibody, antibody fragment, or monobody. The terms “peptide”, “protein” and “polypeptide” herein are used interchangeably

[0194] Antibodies can be in any format well known to a person skilled in the art. Antibodies are heteromultimeric glycoproteins consisting of two larger polypeptide heavy chains and two smaller polypeptide light chains. Each of the heavy chains and light chains comprise a variable region and constant regions. The variable region of the light chain is aligned with the variable region of the heavy chain, and the constant regions of the light chain is aligned with the constant regions of the heavy chain. Each light chain is bound together to a heavy chain via a disulfide covalent bond, and the two heavy chains are bound together by disulfide covalent bonds that can vary in quantity depending on the type of antibody. Antibodies are typically grouped into five different isotypes in mammals: IgA, IgD, IgE, IgG, and IgM. These isotypes are determined by the amino acid sequence of the constant regions of the heavy chains, wherein within each isotype the constant regions of the heavy chains are identical. Light chains are grouped into two different type in mammals: kappa and lambda. Only one type of light chain is present in each antibody, except in the case when the antibody is bispecific. The variable region of the heavy and light chains of the antibody confer the antibody's ability to bind to specific antigens, which are otherwise known as the complementarity-determining region (CDR). The CDR is defined by Dondelinger et al. (Dondelinger et al., Frontiers in Immunology, 9: 2278 (2018)), which along with references cited therein, are incorporated herein in its entirety. The different isotypes determined by the constant regions enable different crystallizable fragments to bind to the antibody or antibody-antigen complex. These crystallizable fragments are associated with different pathways in immunological response and other physiological effects such as clearance rate, cell-mediated cytotoxicity, phagocytosis through agglutination or precipitation, and complement-dependent cytotoxicity.

[0195] In a preferred embodiment, the antibody modulator contains a constant region of the IgG isotype derived from human sources. In another embodiment, the antibody can be humanized or chimeric. In a preferred embodiment, the antibody is monoclonal. In other embodiments, the antibody is polyclonal. In another embodiment, the antibody modulator is used in conjunction with other antibody modulators of other polypeptides or nucleotide sequence of interest to inhibit the expression or activity of multiple polypeptides and/or multiple nucleotide sequences within one or more functional pathways. In another embodiment, the antibody modulator is used in conjunction with other antibody modulators of other polypeptides or nucleotide sequence of interest to increase the expression or activity of multiple polypeptides and/or multiple nucleotide sequences within one or more functional pathways. In yet another embodiment, the antibody is bispecific, being capable of binding to two separate polypeptides or nucleotide sequences, or any combination thereof of interest.

[0196] In certain embodiments, the antibody can comprise additional polypeptide chains or functional groups that confer additional properties to the antibody, such as enhanced immune response, enhanced antigen specificity, or stability.

[0197] In certain embodiments, the modulator is an antibody fragment, such as a single-chain variable fragment or antigen binding fragment, which is able to bind to and inhibit the expression or activity of the polypeptide or nucleotide sequence of interest. In other embodiments, the modulator is an antibody fragment, such as a single-chain variable fragment or antigen binding fragment, which is able to bind to and increase the expression or activity of the polypeptide or nucleotide sequence of interest.

[0198] In some embodiments, the modulator is a monobody which is able to bind to and inhibit the expression or activity of the polypeptide or nucleotide sequence of interest. In other embodiments, the modulator is a monobody which is able to bind to and increase the expression or activity of the polypeptide or nucleotide sequence of interest. Monobodies in various embodiments can be in any format well known to a person skilled in the art. Monobodies are proteins that are smaller and less complex than antibodies, and that are engineered to have antigen-binding properties similar to that of antibodies. Monobodies are created with a fibronectin type III scaffold in which certain sections of its amino acid sequence is varied to create variable specificity to antigens of choice.

[0199] In certain embodiments, there is provided a modulator comprising an antibody, antibody fragment, monobody, or other peptide modulator that binds to the polypeptide or nucleotide sequence of interest, thus modulating the expression or activity of the target polypeptide or nucleotide sequence of interest. In other embodiments, there is provided a modulator comprising an antibody, antibody fragment, monobody, or other peptide modulator that binds to the polypeptide or nucleotide sequence of interest, thus modulating the interaction of the polypeptide or nucleotide sequence of interest with other molecules in the targeted functional pathway. In some embodiments, the modulator comprises an antibody, antibody fragment, monobody or other peptide modulator that binds to the FNIP1 and/or FNIP2 protein or nucleic acid, thus inhibiting or decreasing the expression or activity of FNIP1 and/or FNIP2. In some embodiments, the modulator comprises an antibody, antibody fragment, monobody, or other peptide modulator that disrupts the activity of FNIP1 and/or FNIP2, thereby preventing or reducing its ability to positively regulate the expression or activity of FLCN, thus resulting in a decrease in expression or activity of FLCN. In some embodiments, the antibody, antibody fragment, monobody, or other peptide modulator targets the longin and/or DENN domains of FNIP1 and/or FNIP2, thereby blocking its interaction with FLCN, thus preventing the formation of the FNIP1-FLCN complex and/or FNIP2-FLCN complex respectively. In yet other embodiments, the modulator comprises an antibody, antibody fragment, monobody, or other peptide modulator that decreases the expression or activity of FNIP1 and/or FNIP2, thereby resulting in a decrease in the levels of TDP-43 aggregates in the cytoplasm, or an increase in the levels of functional TDP-43 in the nucleus, or a combination of both.

[0200] In certain embodiments, the modulator comprises an antibody, antibody fragment, monobody, or other peptide modulator that binds to the FNIP1 and/or FNIP2 protein or nucleic acid, thus increasing the expression or activity of FNIP1 and/or FNIP2. In other embodiments, the modulator comprises an antibody, antibody fragment, monobody, or other peptide modulator that increases the activity of FNIP1 and/or FNIP2, thereby increasing its ability to positively regulate the expression or activity of FLCN, thus resulting in an increase in expression or activity of FLCN. In some embodiments, the antibody, antibody fragment, monobody, or other peptide modulator targets the longin and/or DENN domains of FNIP1 and/or FNIP2, thereby promoting its interaction with FLCN to increase the expression or activity of the FNIP1-FLCN complex and/or FNIP2-FLCN complex respectively. Examples of antibody modulators that target FNIP1 and/or FNIP2 are provided in Example 8.

[0201] In one embodiment, antibody modulators that are capable of targeting FNIP1 and/or FNIP2 can be obtained commercially from a variety of sources, such as described in the MSRS catalog of antibodies (Aerie Corporation, Birmingham, Mich.). In some embodiments, provided herein are antibodies, antibody fragments, monobodies, or other peptide modulators for the detection of human FNIP1 and/or FNIP2, as well as their homologs in other animals such as the mouse, rat, zebrafish, or monkey. Such antibodies are available from commercial sources, examples of which are provided in Table 14. In some embodiments, provided herein are antibodies, antibody fragments, monobodies, or other peptide modulators that bind to the same epitope as at least one antibody described in Table 14. In other embodiments, the antibody, antibody fragment, monobody, or other peptide modulator binds to a different epitope as that of the modulators described in Table 14. In some embodiments, the antibody, antibody fragment, monobody, or peptide modulator comprises a CDR that is at least 30%, 40%, 50%, 60%, 70%, 75%, 80%, 85%, 90%, 95%, 96%, 97%, 98%, 99%, or 100% similar to the CDR of at least one antibody described in Table 14, as assessed by sequence alignment or other scoring methods known in the art. Such protein sequence alignment or scoring methods can take into account the 3D structure or conformation of the CDR region. Protein sequence alignment and scoring methods are described by Wang et al. (Wang et al., BMC Bioinformatics, 19: 529 (2018)) and Kunik et al. (Kunik et al., PLoS Computational Biology, 8(2): e1002388 (2012)), which together with references cited therein, are incorporated herein in their entirety.

[0202] Antibodies, antibody fragments, monobodies, and other peptide modulators can be produced by any number of methods known to a person who is skilled in the art (see below for specific methods).

### Small Molecule

[0203] In one embodiment, the modulator is a small molecule.

[0204] A small molecule in various embodiments can be in any format well known to a person skilled in the art. A small molecule is generally referred to as a molecule with molecular weight less than 900 daltons. In other embodiments, a small molecule refers to a molecule with molecular weight less than 1000, less than 2000, or alternatively less than 3000 daltons.

[0205] In certain embodiments, a small molecule modulator can bind to a target nucleic acid, wherein the target nucleic acid encodes FNIP1 and/or FNIP2. In a preferred embodiment, the target nucleic acid is an RNA transcript encoding FNIP1 and/or FNIP2. In other embodiments, the target nucleic acid is a DNA molecule encoding FNIP1 and/or FNIP2.

[0206] In certain embodiments, target nucleic acids can comprise nucleobase sequences encoding FNIP1 and/or FNIP2, including but not limited to the following: the reverse complement of RefSeq Accession No. NC_000004.12 truncated from nucleotides 158767000 to 158910000 (incorporated herein as SEQ ID NO: 1), RefSeq Accession No. NM_020840.3 (incorporated herein as SEQ ID NO: 2), RefSeq Accession No. NM_001323916.2 (incorporated herein as SEQ ID NO: 3), RefSeq Accession No. NM_001346043.2 (incorporated herein as SEQ ID NO: 4), RefSeq Accession No. NM_001366843.1 (incorporated herein as SEQ ID NO: 5), RefSeq Accession No. XM_017008487.1 (incorporated herein as SEQ ID NO: 6), RefSeq Accession No. XM_005263158.2 (incorporated herein as SEQ ID NO: 7), RefSeq Accession No. XM_005263160.3 (incorporated herein as SEQ ID NO: 8), RefSeq Accession No. XR_001741297.1 (incorporated herein as SEQ ID NO: 9), RefSeq Accession No. XM_024454161.1 (incorporated herein as SEQ ID NO: 10), RefSeq Accession No. NC_000005.10 truncated from nucleotides 131639000 to 131799000 (incorporated herein as SEQ ID NO: 11), RefSeq Accession No. NM_133372.3 (incorporated herein as SEQ ID NO: 12), RefSeq Accession No. NM_001008738.3 (incorporated herein as SEQ ID NO: 13), RefSeq Accession No. NM_001346113.2 (incorporated herein as SEQ ID NO: 14), and RefSeq Accession No. NM_001346114.2 (incorporated herein as SEQ ID NO: 15). In some embodiments, small molecule modulators can also target other nucleobase sequences encoding FNIP1 and/or FNIP2 (e.g. other DNA sequences, cDNA sequences, scaffolds, or mRNA transcript variants), including but not limited to entries that can be found by accession number in databases such as NCBI and GENBANK, and which are incorporated herein by reference. In other embodiments, nucleobase sequences encoding FNIP1 and/or FNIP2 include previous and future versions of nucleobase sequences encoding FNIP1 and/or FNIP2, which can be found by accession number in databases such as NCBI and GENBANK, and which are also incorporated herein by reference. In other embodiments, nucleobase sequences encoding FNIP1 and/or FNIP2 include mRNA transcripts that are formed from the utilization of alternative polyadenylation sites. The nucleobase sequence set forth in each SEQ ID NO contained herein is independent of any modification to a nucleobase, a sugar moiety, or an internucleoside linkage.

[0207] In certain embodiments, a small molecule modulator can bind to at least one target region within the target nucleic acid. A target region is a structurally defined region of the target nucleic acid. Examples of a target region include but are not limited to an exon, an intron, an exon-intron junction, an intron-exon junction, an exon-exon junction, a 3′ untranslated region (3′ UTR), a 5′ untranslated region (5′ UTR), a G-quadruplex, a translation initiation region, a translation termination region, a 5′ donor splice site, a 3′ acceptor splice site, a start codon, an upstream open reading frame (ORF), a repeat region, a hexanucleotide repeat expansion, a splice enhancer region, an exonic splicing enhancer (ESE), a splice suppressor region, an exonic splicing silencer (ESS), an intronic splicing enhancer (ISE), an intronic splicing silencer (ISS), an RNA destabilization motif, an RNA stabilization motif, a miRNA binding site, an RNA-binding protein (RBP) binding site, a stem-loop, a bulge, a hairpin, a junction, or other structurally defined nucleic acid region. In one embodiment, the target regions, or structurally defined regions for FNIP1 and/or FNIP2, can be obtained by accession number from sequence databases such as NCBI, UNIPROT and GENBANK, and such information is incorporated herein by reference. In other embodiments, the target regions, or structurally defined regions for FNIP1 and/or FNIP2, can be obtained using computational tools well known in the art that predict the existence of a target region, and/or that predict the stability or structure of a nucleic acid region.

[0208] The determination of suitable target regions can include a comparison of the nucleobase sequence of the target region to other sequences throughout the genome. For example, the BLAST algorithm, or other structure comparison algorithms, can be used to identify regions of similarity amongst different sequences. This comparison can enable the selection of target regions that can be specifically targeted by a small molecule modulator, with a corresponding reduced likelihood of the small molecule modulator binding in a non-specific manner to non-target or off-target sequences.

[0209] In some embodiments, targeting includes determination of at least one target region within a target nucleic acid to which a small molecule modulator can bind in order to produce a desired effect. The desired effect can be a decrease or increase in mRNA levels of a target nucleic acid. The desired effect can be a decrease or increase in the stability of mRNA of a target nucleic acid. The desired effect can also be a decrease or increase in levels of a protein encoded by the target nucleic acid. The desired effect can also be a phenotypic change associated with a change in mRNA levels of a target nucleic acid, and/or change in protein levels encoded by the target nucleic acid. In certain embodiments, the desired effect of using a small molecule modulator to target at least one target region within a target nucleic acid encoding FNIP1 and/or FNIP2 to which it binds, is a reduction in FNIP1 and/or FNIP2 mRNA levels. In other embodiments, the desired effect of using a small molecule modulator to target at least one target region within a target nucleic acid encoding FNIP1 and/or FNIP2 to which it binds is a reduction in FNIP1 and/or FNIP2 protein levels. In yet other embodiments, the desired effect of using a small molecule modulator to target at least one target region within a target nucleic acid encoding FNIP1 and/or FNIP2 to which it binds is a phenotypic change associated with the reduction of FNIP1 and/or FNIP2 mRNA or protein levels. In certain embodiments, the desired effect of using a small molecule modulator to target at least one target region within a target nucleic acid encoding FNIP1 and/or FNIP2 to which it binds, is an increase in FNIP1 and/or FNIP2 mRNA levels. In other embodiments, the desired effect of using a small molecule modulator to target at least one target region within a target nucleic acid encoding FNIP1 and/or FNIP2 to which it binds is an increase in FNIP1 and/or FNIP2 protein levels. In yet other embodiments, the desired effect of using a small molecule modulator to target at least one target region within a target nucleic acid encoding FNIP1 and/or FNIP2 to which it binds is a phenotypic change associated with the increase of FNIP1 and/or FNIP2 mRNA or protein levels.

[0210] In certain embodiments, the small molecule modulators described herein can bind to any target nucleic acid comprising nucleotide sequences encoding FNIP1 and/or FNIP2. In some embodiments, the small molecule modulators can bind to target nucleic acids at any stage of RNA processing within the cell, for example, pre-mRNA or mature mRNA. In yet other embodiments, small molecule modulators can bind to any target region(s) within the target nucleic acid, including but not limited to an exon, an intron, an exon-intron junction, an intron-exon junction, an exon-exon junction, a 3′ untranslated region (3′ UTR), a 5′ untranslated region (5′ UTR), a G-quadruplex, a translation initiation region, a translation termination region, a 5′ donor splice site, a 3′ acceptor splice site, a start codon, an upstream open reading frame (ORF), a repeat region, a hexanucleotide repeat expansion, a splice enhancer region, an exonic splicing enhancer (ESE), a splice suppressor region, an exonic splicing silencer (ESS), an intronic splicing enhancer (ISE), an intronic splicing silencer (ISS), a RNA destabilization motif, a RNA stabilization motif, a miRNA binding site, an RNA-binding protein (RBP) binding site, a stem-loop, a bulge, a hairpin, a junction, or other structurally defined nucleic acid region. In one embodiment, small molecule modulators can bind to at least one exon present in SEQ ID NOs: 1-15. In other embodiments, small molecule modulators can bind to target regions other than exons that are present in SEQ ID NOs: 1-15, wherein such regions can be described in databases such as NCBI, UNIPROT and GENBANK, which are incorporated herein by reference. In other embodiments, small molecule modulators can bind to target regions other than exons that are present in SEQ ID NOs: 1-15, wherein such regions can be predicted using computational tools well known in the art that predict the presence of a target region, and/or that predict the stability or structure of a nucleic acid region.

[0211] In certain embodiments, the small molecule modulators described herein can bind to all RNA transcript variants of FNIP1 and/or FNIP2. In other embodiments, the small molecule modulators described herein bind selectively to at least one RNA transcript variant of FNIP1 and/or FNIP2. Transcript variants of FNIP1 and/or FNIP2 can include mRNA transcripts generated by differential splicing, or mRNA transcripts containing mutations (e.g., SNPs, INDELs etc.) when compared to a reference sequence. In certain embodiments, the small molecule modulators described herein inhibit the expression of all transcript variants of FNIP1 and/or FNIP2. In certain embodiments, the small molecule modulators described herein inhibit expression of all transcript variants of FNIP1 and/or FNIP2 equally. In certain embodiments, the small molecule modulator described herein preferentially inhibits the expression of certain transcript variants of FNIP1 and/or FNIP2. In other embodiments, the small molecule modulators described herein increase the expression of all transcript variants of FNIP1 and/or FNIP2. In certain embodiments, the small molecule modulators described herein increase the expression of all transcript variants of FNIP1 and/or FNIP2 equally. In certain embodiments, the small molecule modulator described herein preferentially increases the expression of certain transcript variants of FNIP1 and/or FNIP2. In certain embodiments, small molecule modulators described herein are useful for reducing cytoplasmic TDP-43 aggregates, or increasing the levels of functional TDP-43 in the nucleus, or a combination thereof. In certain embodiments, small molecule modulators described herein are useful for normalizing the expression of various mis-regulated genes.

[0212] Thus, in certain embodiments, provided herein are modulators comprising a small molecule that binds to a nucleic acid encoding FNIP1 and/or FNIP2, thus inhibiting or reducing the expression of FNIP1 and/or FNIP2. In one embodiment, the small molecule modulator targets a nucleic acid encoding FNIP1 and/or FNIP2 and inhibits its transcription. In one embodiment, the small molecule modulator targets a nucleic acid encoding FNIP1 and/or FNIP2 and degrades or destabilizes it. In one embodiment, the small molecule modulator targets a region of a nucleic acid encoding FNIP1 and/or FNIP2 that is an RNA stabilization site, thus destabilizing the nucleic acid and reducing its expression levels. In one embodiment, the small molecule modulator targets a region of a nucleic acid encoding FNIP1 and/or FNIP2 that is an RBP binding site for a stabilization factor, thus destabilizing the nucleic acid and reducing its expression levels. In one embodiment, the small molecule modulator targets a nucleic acid encoding FNIP1 and/or FNIP2 and inhibits its translation. In yet another embodiment, the small molecule modulator targets a nucleic acid encoding FNIP1 and/or FNIP2 and modulates its splicing, thereby decreasing the expression or activity of FNIP1 and/or FNIP2. In some embodiments, the small molecule modulator is a bivalent compound that is capable of binding to both a nucleic acid encoding FNIP1 and/or FNIP2 and a ribonuclease such as RNase L to induce degradation of the nucleic acid encoding FNIP1 and/or FNIP2. Such bivalent compounds are known as RIBOTACs (ribonuclease-targeting chimeras) and are described by Dey et al. (Dey et al., Cell Chemical Biology, 26(8): 1047-1049 (2019)), which together with references cited therein, are incorporated herein in their entirety.

[0213] In other embodiments, the modulator comprises a small molecule that binds to a nucleic acid encoding FNIP1 and/or FNIP2, thus increasing the expression of FNIP1 and/or FNIP2. In one embodiment, the small molecule modulator targets a nucleic acid encoding FNIP1 and/or FNIP2 and increases its transcription. In one embodiment, the small molecule modulator targets a nucleic acid encoding FNIP1 and/or FNIP2 and stabilizes it. In one embodiment, the small molecule targets a region of a nucleic acid encoding FNIP1 and/or FNIP2 that is an RBP binding site for a destabilization factor, thus stabilizing the nucleic acid and increasing its expression levels. In one embodiment, the small molecule targets a region of a nucleic acid encoding FNIP1 and/or FNIP2 that is a miRNA binding site, thus increasing the stability and expression of the nucleic acid. In one embodiment, the small molecule modulator targets a nucleic acid encoding FNIP1 and/or FNIP2 and increases its translation. In yet another embodiment, the small molecule modulator targets a nucleic acid encoding FNIP1 and/or FNIP2 and modulates its splicing, thereby increasing the expression or activity of FNIP1 and/or FNIP2.

[0214] In certain embodiments, there is provided a modulator comprising a small molecule that binds to a polypeptide or protein of interest, thus modulating the expression or activity of the target polypeptide or protein of interest. In other embodiments, there is provided a modulator comprising a small molecule that binds to a polypeptide or protein of interest, thus modulating the interaction of the polypeptide or protein of interest with other molecules in the targeted functional pathway. In one embodiment, the modulator comprises a small molecule that binds to a FNIP1 and/or FNIP2 protein, thus inhibiting or reducing the activity of FNIP1 and/or FNIP2 protein. In some embodiments, the modulator comprises a small molecule that decreases the expression or activity of FNIP1 and/or FNIP2 protein, thereby preventing or reducing its ability to positively regulate the expression or activity of FLCN, thus resulting in a decrease in expression or activity of FLCN. In some embodiments, the small molecule modulator targets the longin and/or DENN domains of FNIP1 and/or FNIP2 protein, thereby blocking its interaction with FLCN, thus preventing the formation of the FNIP1-FLCN complex and/or FNIP2-FLCN complex respectively. In yet other embodiments, the modulator comprises a small molecule that decreases the expression or activity of FNIP1 and/or FNIP2 protein, thereby resulting in a decrease in the levels of TDP-43 aggregates in the cytoplasm, or an increase in the levels of functional TDP-43 in the nucleus, or a combination of both. In certain embodiments, the small molecule modulator reduces or inhibits the expression or activity of FNIP1 and/or FNIP2 protein by targeting it for degradation in the cell. In some embodiments, the small molecule modulator is a bivalent compound that is capable of binding to both FNIP1 and/or FNIP2 and an E3 ubiquitin ligase to induce ubiquitination of FNIP1 and/or FNIP2 and its subsequent degradation by the proteasome. Such bivalent compounds are known as PROTACS (proteolysis-targeting chimeras) and are described by Toure et al. (Toure et al., Angew. Chem. Int. Ed., 55: 1966-1973 (2016)), which together with references cited therein, are incorporated herein in their entirety.

[0215] In other embodiments, the modulator comprises a small molecule that binds to an FNIP1 and/or FNIP2 protein, thus increasing the activity of FNIP1 and/or FNIP2 protein. In some embodiments, the modulator comprises a small molecule that increases the expression or activity of FNIP1 and/or FNIP2 protein, thereby increasing its ability to positively regulate the expression or activity of FLCN, thus resulting in an increase in expression or activity of FLCN. In some embodiments, the small molecule modulator targets the longin and/or DENN domains of FNIP1 and/or FNIP2 protein, thereby promoting its interaction with FLCN, thus increasing the formation of the FNIP1-FLCN complex and/or FNIP2-FLCN complex respectively. In another embodiment, provided herein are bivalent small molecule modulators that are capable of increasing the interaction of FLCN with FNIP1 or FNIP2, thereby leading to an increase in the levels or activity of the FNIP1-FLCN and/or FNIP2-FLCN complex respectively.

[0216] Novel small molecule modulators that target the FNIP1 and/or FNIP2 nucleic acid and/or protein are provided in Example 7. In certain embodiments, provided herein are small molecule modulators comprising at least one exemplar described in Table 12 and/or Table 13. In certain embodiments, the small molecule modulator comprises at least one scaffold described in Table 12 and/or Table 13. In some embodiments, the small molecule modulator, or part thereof, is similar to at least one exemplar or scaffold in Table 12 and/or Table 13. Similarity between small molecules can be determined using methods well known in the art, such as for example, deriving the Tanimoto index, Dice index, Cosine coefficient or Soergel distance etc. Such methods are described in Bajusz et al. (Bajusz et al., Journal of Cheminformatics, 7: Article number 20 (2015)), which together with the references cited therein, are incorporated herein in their entirety. In some embodiments, provided herein are small molecule modulators, or part thereof, which have a Tanimoto index of at least 0.20, 0.30, 0.40, 0.50, 0.60, 0.70, 0.75, 0.80, 0.85, 0.90, 0.95, 0.96, 0.97, 0.98, 0.99, or 1.00 compared to at least one exemplar or scaffold described in Table 12 and/or Table 13. The predicted dissociation constants of each small molecule exemplar, as calculated using software known in the art, are also described under the column “Exemplar Dissociation Constants” in Table 12 and Table 13. Small molecule modulators with smaller dissociation constants are predicted to bind more strongly to the target nucleic acid and/or protein.

[0217] Small molecules can be produced by any number of methods known to a person who is skilled in the art (see below for specific methods).

### Pharmaceutical Compositions

[0218] A set of embodiments provides a pharmaceutical composition comprising at least one modulator together with a pharmaceutically acceptable carrier or diluent. The carrier or diluent of the pharmaceutical composition must be “acceptable” in the sense of being compatible with the other ingredients of the composition and not deleterious to the recipients thereof. The pharmaceutical composition may be in unitary dosage form suitable, in particular, for administration orally, rectally, percutaneously, by parenteral injection or by inhalation. In some cases, administration can be via intravenous injection. For example, in preparing the composition in oral dosage form, any of the usual pharmaceutical media may be employed such as, for example, water, glycols, oils, alcohols and the like in the case of oral liquid preparations such as suspensions, syrups, elixirs, emulsions and solutions; or solid carriers such as starches, sugars, kaolin, diluents, lubricants, binders, disintegrating agents and the like in the case of powders, pills, capsules and tablets. Because of their ease in administration, tablets and capsules represent the most advantageous oral dosage unit forms in which case solid pharmaceutical carriers are obviously employed. For parenteral compositions, the carrier will usually comprise sterile water, at least in large part, though other ingredients, for example, to aid solubility, may be included. Injectable solutions, for example, may be prepared in which the carrier comprises saline solution, glucose solution or a mixture of saline and glucose solution. Injectable solutions, for example, may be prepared in which the carrier comprises saline solution, glucose solution or a mixture of saline and glucose solution. Injectable solutions containing the modulators described herein may be formulated in oil for prolonged action. Appropriate oils for this purpose are, for example, peanut oil, sesame oil, cottonseed oil, corn oil, soybean oil, synthetic glycerol esters of long chain fatty acids and mixtures of these and other oils. Injectable suspensions may also be prepared in which case appropriate liquid carriers, suspending agents and the like may be employed. Also included are solid form preparations that are intended to be converted, shortly before use, to liquid form preparations. In the compositions suitable for percutaneous administration, the carrier optionally comprises a penetration enhancing agent and/or a suitable wetting agent, optionally combined with suitable additives of any nature in minor proportions, which additives do not introduce a significant deleterious effect on the skin. Said additives may facilitate the administration to the skin and/or may be helpful for preparing the desired composition. The composition may be administered in various ways, e.g., as a transdermal patch, as a spot-on, as an ointment.

[0219] It is especially advantageous to formulate the aforementioned pharmaceutical compositions in unit dosage form for ease of administration and uniformity of dosage. Unit dosage form as used herein refers to physically discrete units suitable as unitary dosages, each unit containing a predetermined quantity of active ingredient calculated to produce the desired therapeutic effect in association with the required pharmaceutical carrier. Examples of such unit dosage forms are tablets (including scored or coated tablets), capsules, pills, powder packets, wafers, suppositories, injectable solutions or suspensions and the like, and segregated multiples thereof.

[0220] Pharmaceutical compositions can be created using standard practices that are known to a person who is skilled in the art. Pharmaceutical compositions can be designed for administration in one of a number of various methods that are known to a person who is skilled in the art. A more detailed list of common practices is described by Wu & Chen (US 2018/0112272 A1), which along with references cited therein, are incorporated herein in its entirety.

[0221] In one embodiment, the pharmaceutical composition is for parenteral administration. In certain embodiments, compositions for parenteral administration can be sterile solutions, emulsions or suspensions that can be prepared from a solid or lyophilized form prior to administration. In other embodiments, the composition can contain certain adjuvants, anesthetics, buffering agents, or wetting agents that promote more effective distribution of the composition, facilitate ease of administration of the composition, or improve patient response or wellbeing. In one embodiment, the pharmaceutical composition is for intrathecal administration. In other embodiments, the pharmaceutical composition is for intramuscular, intracerebral, intracerebroventricular, intravenous, intravitreal or intraocular administration.

[0222] In another embodiment, the pharmaceutical composition is for gastrointestinal or enteric administration. In one embodiment, the pharmaceutical composition can be administered orally. In certain embodiments, compositions for gastrointestinal or oral administration can be a tablet, powder, capsule, or liquid. Such compositions can be formulated with a solid or liquid physiologically compatible carrier, including but not limited to, mannitol, lactose, starch, magnesium stearate, sodium saccharine, talcum, cellulose, glucose, sucrose, magnesium, carbonate. In some embodiments, compositions can be formulated with disintegrants, including but not limited to starches, clays, celluloses, aligns, gums, and polymers, to facilitate the dissolution of solids. In other embodiments, compositions can also be formulated with lubricants, including but not limited to silicon dioxide, talc, or stearic acids, to facilitate the effective manufacturing of the composition.

[0223] In another embodiment, the pharmaceutical composition is administered transdermally or topically, such as in the form of an ointment, cream, or gel. In another embodiment, the pharmaceutical composition is administered transmucosally, such as in the form of a spray or a suppository.

[0224] In one embodiment, the pharmaceutical composition can be administered by nasal administration, including but not limited to, an inhalant, or delivered in an aerosol delivery device, such as an atomizer, nebulizer, or vaporizer. The aerosol delivery devices mentioned herein and other aerosol delivery devices are well known to a person of ordinary skill in the art and are included in various embodiments herein.

[0225] In another embodiment, the pharmaceutical composition is delivered via a targeted method that introduces or directs the pharmaceutical composition directly to the affected cells. Manish and Vimukta (Manish and Vimukta, Research Journal of Chemical Sciences, 1(2), 135-138 (2011)) describe common methods for targeted drug delivery, which along with references cited therein, are incorporated herein by reference in its entirety.

[0226] One set of embodiments provide for pharmaceutical compositions and methods, comprising a modulator and a pharmaceutically acceptable carrier or diluent mentioned herein, which can be administered to a cell, an animal, or a human subject to inhibit or decrease the expression or activity of FNIP1 and/or FNIP2 in the cell, animal or human subject. Such treatment methods can be used to treat, ameliorate, or prevent diseases, particularly neuromuscular or neurodegenerative diseases, such as for example, ALS, FTLD, Alzheimer's disease, retinal degeneration diseases such as age-related macular degeneration (AIVMD), and other TDP-43 proteinopathies; as well as oxidative stress, obesity, anemia, or ischemic diseases, such as cardiovascular disease, myocardial ischemia and peripheral vascular disease.

[0227] Another set of embodiments provide for pharmaceutical compositions and methods, comprising a modulator and a pharmaceutically acceptable carrier or diluent, mentioned herein which can be administered to a cell, an animal, or a human subject to increase the expression or activity of FNIP1 and/or FNIP2 in the cell, animal or human subject, which can be used to treat, ameliorate, or prevent diseases, particularly inflammatory diseases, von Hippel-Lindau (VHL) disease, Birt-Hogg-Dube (BHD) syndrome, spontaneous pneumothorax, B cell deficiency, and cardiomyopathy; as well as cancers, such as fibrofolliculomas, kidney tumors, clear cell renal cell carcinoma, multilocular clear cell renal carcinoma, chromophobe renal cell carcinoma, renal oncocytic hybrid carcinoma, bladder cancer, uterine corpus endometrioid cancer, interdigitating dendritic cell sarcoma, hemangioblastomas, pancreatic neuroendocrine tumors, pheochromocytomas, endolymphatic sac tumors, kidney cysts, lung cysts, and other diseases that are linked to loss-of-function of FNIP1 and/or FNIP2.

### Treatment Methods

[0228] In certain embodiments, methods of treatment comprising administration of the pharmaceutical compositions to a cell, an animal or a human subject can vary in terms of composition, quantity of doses, and scheduling of doses. A unit dose is a pre-determined therapeutically effective amount of pharmaceutical composition that is administered. Unit doses can vary depending on various factors, including but not limited to, weight, age, gender, severity of symptoms, medical history, and aggressiveness of treatment. A schedule is the frequency of administration of unit doses. The size of a unit dose and the schedule of administration of the pharmaceutical composition can be determined by a person of ordinary skill in the art and are incorporated in certain embodiments herein.

[0229] In certain embodiments, one or more pharmaceutical compositions described herein are co-administered with one or more other pharmaceutical agents. In one embodiment, the one or more other pharmaceutical agents are designed to treat a different disease, disorder, symptom, or condition compared to the one or more pharmaceutical compositions described herein. In another embodiment, the one or more other pharmaceutical agents are designed to treat the same disease, disorder, symptom, or condition as the one or more pharmaceutical compositions described herein. In certain embodiments, the one or more other pharmaceutical agents are co-administered with one or more pharmaceutical compositions described herein to produce an additive effect. In certain embodiments, the one or more other pharmaceutical agents are co-administered with one or more pharmaceutical compositions described herein to produce a synergistic or supra-additive effect, wherein the co-administration of the pharmaceutical composition and agent results in an effect that is greater than the sum of the effects of administering either pharmaceutical composition or agent alone. In another embodiment, the one or more other pharmaceutical agents are co-administered with one or more pharmaceutical compositions described herein to treat an undesired side effect of one or more pharmaceutical compositions described herein. In certain embodiments, one or more pharmaceutical compositions described herein are co-administered with one or more other pharmaceutical agents to treat an undesired side effect of the one or more other pharmaceutical agents. In certain embodiments, one or more pharmaceutical compositions described herein are co-administered with one or more other pharmaceutical agents to prevent or delay the onset of symptoms, slow disease progression, improve the therapeutic efficacy of the one or more pharmaceutical compositions, or to otherwise improve patient outcomes.

[0230] In some embodiments, one or more pharmaceutical compositions described herein and one or more other pharmaceutical agents are prepared together in a single formulation. In other embodiments, one or more pharmaceutical compositions described herein and one or more other pharmaceutical agents are prepared separately. In certain embodiments, the one or more pharmaceutical agents are administered following administration of one or more pharmaceutical compositions described herein. In certain embodiments, the one or more pharmaceutical agents are administered prior to administration of one or more pharmaceutical composition described herein. In certain embodiments, the pharmaceutical agent is co-administered at the same time as a pharmaceutical composition described herein.

[0231] In certain embodiments, the one or more pharmaceutical composition described herein and the one or more other pharmaceutical agent are antisense modulators. In certain embodiments, the one or more pharmaceutical composition described herein is an antisense modulator, and the one or more other pharmaceutical agent is a small molecule modulator. In other embodiments, the one or more pharmaceutical composition described herein and the one or more other pharmaceutical agent can independently comprise modulators such as antisense modulators, other oligonucleotide modulators (e.g., ribozyme, deoxyribozyme, or aptamers), antibody modulators, peptide modulators, small molecule modulators, and/or nucleic acid vectors. In certain embodiments, one or more pharmaceutical agents that can be co-administered with one or more pharmaceutical compositions described herein include Riluzole (Rilutek), Dexpramipexole, Edaravone, Tofersen, Baclofen (Lioresal), or other drug that is typically administered to treat or ameliorate symptoms in ALS. In another embodiment, one or more pharmaceutical agents that can be co-administered with one or more pharmaceutical compositions described herein include one or more drugs that are typically administered to treat, ameliorate, or manage symptoms in a TDP-43 proteinopathy. In another embodiment, one or more pharmaceutical agents that can be co-administered with one or more pharmaceutical compositions described herein include one or more drugs that are typically administered to treat, ameliorate, or manage symptoms in oxidative stress, obesity, anemia or ischemic diseases. In yet another embodiment, one or more pharmaceutical agents that can be co-administered with one or more pharmaceutical compositions described herein include one or more drugs that are typically administered to treat or ameliorate symptoms in diseases such as inflammatory diseases, von Hippel-Lindau (VHL) disease, Birt-Hogg-Dube (BHD) syndrome, B cell deficiency, cardiomyopathy, spontaneous pneumothorax, as well as cancers. In certain embodiments, one or more pharmaceutical agents that can be co-administered with one or more pharmaceutical compositions described herein include drugs that alleviate pain, inflammation or other symptoms (e.g., COX inhibitors, phenylbutazone, ibuprofen, suprofen, fenbufen, ketoprofen, pranoprofen, carprofen, indomethacin, folinic acid, tiaprofenic acid, diclofenac, niflumic acid, diazepines or benzodiazepines (e.g., Diazepam), barbiturate); or drugs that improve uptake or delivery, such as blood thinners (e.g., aspirin, warfarin); or antibacterial, antiviral, antibiotic; or other drug that provides at least one benefit, including treatment efficacy, symptom alleviation, drug tolerance, or side effect mediation, in a therapeutic setting.

[0232] In certain embodiments, one or more pharmaceutical agents that can be co-administered with a pharmaceutical composition to reduce or inhibit the expression or activity of FNIP1 and/or FNIP2 described herein include, but are not limited to, an additional FNIP1 and/or FNIP2 modulator, or other modulator that can reduce the levels of pathological TDP-43 aggregates in the cytoplasm, or increase the levels of functional TDP-43 in the nucleus, or achieve a combination of both. In certain embodiments, the dose of a co-administered pharmaceutical agent is lower than the dose that would be administered if the co-administered pharmaceutical agent was administered alone. In certain embodiments the dose of a co-administered pharmaceutical agent is higher than the dose that would be administered if the co-administered pharmaceutical agent was administered alone. In certain embodiments the dose of a co-administered pharmaceutical agent is the same as the dose that would be administered if the co-administered pharmaceutical agent was administered alone.

### Certain Indications

[0233] In certain embodiments, provided herein are methods of treatment of a human subject diagnosed with a neuromuscular or neurodegenerative disease, such as, for example, ALS, FTLD, Alzheimer's disease, retinal degeneration diseases such as age-related macular degeneration (AMD), or other TDP-43 proteinopathies described herein, comprising administering one or more pharmaceutical compositions described herein to the human individual. In certain embodiments, provided herein are methods for prophylactically reducing or inhibiting FNIP1 and/or FNIP2 expression or activity in a human subject, wherein the human subject is at risk for developing a neuromuscular or neurodegenerative disease, including but not limited to, ALS, or other TDP-43 proteinopathies described herein. In some embodiments, provided herein are methods of treatment of a human subject diagnosed with oxidative stress, obesity, anemia or ischemic disease, such as, for example, chronic anemia, cardiovascular disease, myocardial ischemia or peripheral vascular disease, comprising administering one or more pharmaceutical compositions described herein to the human individual. In certain embodiments, provided herein are methods for prophylactically reducing or inhibiting FNIP1 and/or FNIP2 expression or activity in a human subject, wherein the human subject is at risk for developing oxidative stress, obesity, anemia, or ischemic diseases, such as cardiovascular disease, myocardial ischemia, or peripheral vascular disease.

[0234] In certain embodiments, provided herein are methods of treatment of a human subject diagnosed with a disease, such as von Hippel-Lindau (VHL) disease, Birt-Hogg-Dube (BHD) syndrome, spontaneous pneumothorax, B cell deficiency, cardiomyopathy, as well as cancers, such as fibrofolliculomas, kidney tumors, clear cell renal cell carcinoma, multilocular clear cell renal carcinoma, chromophobe renal cell carcinoma, renal oncocytic hybrid carcinoma, bladder cancer, uterine corpus endometrioid cancer, interdigitating dendritic cell sarcoma, hemangioblastomas, pancreatic neuroendocrine tumors, pheochromocytomas, endolymphatic sac tumors, kidney cysts, lung cysts, or other cancers described herein, comprising administering one or more pharmaceutical compositions described herein to the human individual. In certain embodiments, provided herein are methods for prophylactically increasing FNIP1 and/or FNIP2 expression or activity in a human subject, wherein the human subject is at risk for developing von Hippel-Lindau (VHL) disease, Birt-Hogg-Dube (BHD) syndrome, spontaneous pneumothorax, B cell deficiency, cardiomyopathy, as well as cancers described herein. In some embodiments, provided herein are methods of treatment of a human subject diagnosed with inflammatory diseases, such as, for example, allergy, asthma, atherosclerosis, autoimmune diseases, coeliac disease, glomerulonephritis, hepatitis, inflammatory bowel disease, non-alcoholic steatohepatitis (NASH), psoriasis, renal fibrosis, reperfusion injury, rheumatoid arthritis, transplant rejection, tubular ischemia-reperfusion damage, vascular inflammation, or neuroinflammatory diseases described herein, comprising administering one or more pharmaceutical compositions described herein to the human individual. In certain embodiments, provided herein are methods for prophylactically increasing FNIP1 and/or FNIP2 expression or activity in a human subject, wherein the human subject is at risk for developing an inflammatory disease described herein.

[0235] In certain embodiments, provided herein are methods of treatment of a human subject in need thereof by administering to the human individual a therapeutically effective amount of an antisense modulator targeting one or more FNIP1 and/or FNIP2 nucleic acids disclosed by SEQ ID NOs: 1-15 herein. In one embodiment, administration of a therapeutically effective amount of an antisense modulator targeted to a FNIP1 and/or FNIP2 nucleic acid disclosed by SEQ ID NOs: 1-15 herein is accompanied by monitoring of FNIP1 and/or FNIP2 levels in the human individual, to determine the individual's response to administration of the antisense modulator. In some embodiments, provided herein are methods of treatment of a human subject in need thereof by gene therapy, comprising administering to the human individual a therapeutically effective amount of a nucleic acid vector described herein. In one embodiment, administration of a therapeutically effective amount of a nucleic acid vector is accompanied by monitoring of FNIP1 and/or FNIP2 levels in the human individual, to determine the individual's response to administration of the nucleic acid vector modulator. In certain embodiments, provided herein are methods of treatment of a human subject in need thereof by administering to the human individual a therapeutically effective amount of a modulator described herein, such as, for example, other oligonucleotide modulator, antibody modulator, peptide modulator, or small molecule modulator, that targets the expression or activity of FNIP1 and/or FNIP2. In one embodiment, administration of a therapeutically effective amount of a modulator described herein, such as, for example, other oligonucleotide modulator, antibody modulator, peptide modulator, or small molecule modulator, is accompanied by monitoring of FNIP1 and/or FNIP2 levels in the human individual to determine the individual's response to administration of the modulator. A human subject's response to administration of the antisense or other modulator can be used by a physician to determine the dose, schedule, and duration of therapeutic intervention.

[0236] In certain embodiments, administration of an antisense modulator targeted to a FNIP1 and/or FNIP2 nucleic acid disclosed by SEQ ID NOs: 1-15 herein, results in a decrease of FNIP1 and/or FNIP2 mRNA or protein expression by at least 5, 10, 20, 30, 40, 50, 60, 70, 80, 85, 90, 95, 96, 97, 98, or 99%, or a range defined by any two of these values. In other embodiments, administration of an antisense modulator targeted to a FNIP1 and/or FNIP2 nucleic acid disclosed by SEQ ID NOs: 1-15 herein, results in an increase of FNIP1 and/or FNIP2 mRNA or protein levels by at least 10, 50, 100, 200, 300, 400, 500, 600, 700, 800, 900, 1900, 2900, 3900, 4900, 5900, 6900, 7900, 8900, or 9900%, or a range defined by any two of these values. In certain embodiments, administration of an antisense modulator targeted to a FNIP1 and/or FNIP2 nucleic acid disclosed by SEQ ID NOs: 1-15 herein, results in improved motor function and respiration in a human subject. In certain embodiments, administration of a FNIP1 and/or FNIP2 antisense modulator improves motor function and respiration by at least 5, 10, 20, 30, 40, 50, 60, 70, 80, 85, 90, 95, 96, 97, 98, or 99%, or a range defined by any two of these values. In certain embodiments, administration of a modulator, such as a nucleic acid vector, oligonucleotide modulator, antibody modulator, peptide modulator, or small molecule modulator, results in a decrease of FNIP1 and/or FNIP2 mRNA or protein expression by at least 5, 10, 20, 30, 40, 50, 60, 70, 80, 85, 90, 95, 96, 97, 98, or 99%, or a range defined by any two of these values. In certain embodiments, administration of a modulator, such as a nucleic acid vector, oligonucleotide modulator, antibody modulator, peptide modulator, or small molecule modulator, results in an increase of FNIP1 and/or FNIP2 mRNA or protein levels by at least 10, 50, 100, 200, 300, 400, 500, 600, 700, 800, 900, 1900, 2900, 3900, 4900, 5900, 6900, 7900, 8900, or 9900%, or a range defined by any two of these values. In certain embodiments, administration of a modulator, such as a nucleic acid vector, oligonucleotide modulator, antibody modulator, peptide modulator, or small molecule modulator, results in improved motor function and respiration in a human subject. In certain embodiments, administration of a modulator, such as a nucleic acid vector, oligonucleotide modulator, antibody modulator, peptide modulator, or small molecule modulator, improves motor function and respiration by at least 5, 10, 20, 30, 40, 50, 60, 70, 80, 85, 90, 95, 96, 97, 98, or 99%, or a range defined by any two of these values.

[0237] In certain embodiments, pharmaceutical compositions comprising an antisense modulator targeted to FNIP1 and/or FNIP2, wherein the modulator is capable of decreasing the expression or activity of FNIP1 and/or FNIP2, are used for the preparation of a medicament for treating a patient diagnosed with or susceptible to a disease, particularly neuromuscular or neurodegenerative disease, such as, for example ALS, FTLD, or other TDP-43 proteinopathies; as well as oxidative stress, obesity, anemia or ischemic diseases described herein. In other embodiments, pharmaceutical compositions comprising a modulator described herein, such as a nucleic acid vector, oligonucleotide modulator, antibody modulator, peptide modulator, or small molecule modulator, wherein the modulator is capable of decreasing the expression or activity of FNIP1 and/or FNIP2, are used for the preparation of a medicament for treating a patient diagnosed with or susceptible to a disease, particularly neuromuscular or neurodegenerative disease, such as, for example ALS, FTLD, or other TDP-43 proteinopathies; as well as oxidative stress, obesity, anemia or ischemic diseases described herein.

[0238] In other embodiments, pharmaceutical compositions comprising an antisense modulator targeted to FNIP1 and/or FNIP2, wherein the modulator is capable of increasing the expression or activity of FNIP1 and/or FNIP2, are used for the preparation of a medicament for treating a patient diagnosed with or susceptible to a disease, particularly inflammatory diseases, von Hippel-Lindau (VHL) disease, Birt-Hogg-Dube (BHD) syndrome, spontaneous pneumothorax, B cell deficiency, cardiomyopathy, as well as cancers described herein. In other embodiments, pharmaceutical compositions comprising a modulator described herein, such as a nucleic acid vector, oligonucleotide modulator, antibody modulator, peptide modulator, or small molecule modulator, wherein the modulator is capable of increasing the expression or activity of FNIP1 and/or FNIP2, are used for the preparation of a medicament for treating a patient diagnosed with or susceptible to a disease, particularly inflammatory diseases, von Hippel-Lindau (VHL) disease, Birt-Hogg-Dube (BHD) syndrome, spontaneous pneumothorax, B cell deficiency, cardiomyopathy, as well as cancers described herein.

### Methods of Development

[0239] In certain embodiments, provided herein are methods of development of a modulator, such as an antisense modulator, oligonucleotide modulator, antibody modulator, peptide modulator, or small molecule modulator, which are capable of modulating the expression or activity of FNIP1 and/or FNIP2. In certain embodiments, the methods of development of a modulator are entirely computational. In some embodiments, the methods of development of a modulator involve biochemical methods, such as screens and selections. In some embodiments, the methods of development of a modulator involve a combination of biochemical and computational methods. Such methods of development involve standard practices that are known to a person who is skilled in the art and are incorporated in certain embodiments herein.

[0240] In some embodiments, computational methods can involve artificial intelligence or machine learning software, rely on large molecular databases, utilize high throughput analysis, or any combination thereof. In one embodiment, a computational method can be used to screen existing drug candidates, which can be repurposed for use as modulators herein. Certain methods for computational drug repurposing are described by Li et al. (Li et al., Briefings in Bioinformatics, 17(1): 2-12 (2016)) and Hodos et al. (Hodos et al., Wiley Interdisciplinary Reviews: Systems Biology and Medicine, 8(3): 186-210 (2016)), which, along with the references cited therein, are incorporated by reference herein in their entirety. Other computational methods are well known to a person of ordinary skill in the art and are included in various embodiments herein.

### Antisense Modulator

[0241] In certain embodiments, provided herein are methods of development of antisense modulators that are capable of targeting one or more transcripts of FNIP1 and/or FNIP2 described by SEQ ID NOs: 1-15, or its associated genes or pathways, thereby modulating the expression or activity of FNIP1 and/or FNIP2. Antisense modulators include compounds that do not act through the RNAi pathway, such as antisense oligonucleotides, as well as compounds that act through the RNAi pathway, such as siRNA, shRNA, or miRNA. The design of an appropriate antisense modulator is critical to its safety and effectiveness as a therapy.

[0242] Several guiding principles can be used individually or in conjunction with one another to design antisense oligonucleotide modulators. Firstly, the sequence of the modulator should be antisense to the target genetic sequence of choice. However, mismatches or imperfect complementarity between the antisense oligonucleotide modulator and target sequence can be tolerated as described elsewhere herein. Secondly, the sequence of the antisense oligonucleotide modulator is ideally not more than 10, 12, 14, 16, 18, 20, 22, 24, 26, 28, 30, 32, 34, 36, 38, or 40 nucleotides in length. In a preferred embodiment, the antisense oligonucleotide modulator is between 12 to 30 nucleotides in length. Thirdly, the antisense oligonucleotide modulator ideally targets a region of the target nucleic acid that is accessible and does not contain stable secondary structures. Fourthly, the antisense oligonucleotide modulator should possess sufficient binding energy to the target nucleic acid molecule. The antisense oligonucleotide modulator can be modified to improve stability, delivery and efficacy, as described elsewhere herein. Methods and procedures for designing and developing antisense oligonucleotides are well known in the art, for example, as described by Chan et al. (Chan et al., Clinical and Experimental Pharmacology and Physiology, 33:533-540 (2006)), which along with references cited therein, is incorporated by reference in its entirety. Delivery systems for antisense oligonucleotides are described herein and further described by Chan et al. and Zhao et al. (Zhao et al., Expert Opinion on Drug Delivery, 6(7): 673-686 (2009)), both of which along with references cited therein, are incorporated by reference in their entirety and are known to a person of ordinary skill in the art.

[0243] The methods detailed below are relevant to the screening and development of siRNA, shRNA, or miRNA, and any procedures detailed below for the screening of siRNA are also applicable to shRNA and miRNA. The methods detailed below are also relevant to the screening and development of antisense oligonucleotides, and any procedures detailed below for the screening of siRNA are also applicable to antisense oligonucleotide modulators.

[0244] The design of an appropriate siRNA sequence is critical to the performance of RNAi therapies. siRNA sequences are chosen based on several guiding principles that can be used individually or in conjunction with one another. Firstly, the siRNA should be antisense to the target genetic sequence of choice. Secondly, the siRNA sequence can ideally be chosen to be in the range of 19 to 29 nucleotides in length. Thirdly, the target area of the genetic sequence should be at least 100 nucleotides from the initiation codon and 50 nucleotides away from the stop codon. Fourthly, the introduction of 3′-d(TT) overhangs are recommended. Fifthly, structural considerations should be made to promote stability and effectiveness of the siRNA (e.g., the GC ratio limited to between 45% and 55%, or the elimination of poly-C or poly-G sequences). Certain tools (e.g., http://sima.wi.mit.edu/) can be used to assist in the development of appropriate siRNA designs. A BLAST search is recommended to be performed to eliminate siRNA candidates with low specificity to the targeted genetic sequence. In certain cases, the siRNA sequence or multiple siRNA sequences can be integrated into a strand of double-stranded RNA. The siRNA modulator can be modified to improve stability, delivery and efficacy, as described elsewhere herein. Methods and procedures for developing oligonucleotides for RNAi treatment are further described by Duxbury and Whang (Duxbury and Whang, Journal of Surgical Research, 117:339-344 (2004)), which along with references cited therein, are incorporated by reference in its entirety and are known to a person of ordinary skill in the art. Delivery systems for RNAi treatments are further described by Deng et al. (Deng et al., Gene, 538(2):217-227 (2014)), which along with references cited therein, is incorporated by reference in its entirety and are known to a person of ordinary skill in the art.

### Small Molecule

[0245] In certain embodiments, provided herein are methods of development of small molecule modulators that are capable of targeting FNIP1 and/or FNIP2, or its associated genes or pathways, thereby modulating the expression or activity of FNIP1 and/or FNIP2. Provided herein are methods of development of small molecule modulators that target nucleic acids encoding FNIP1 and/or FNIP2. Also provided herein are methods of development of small molecule modulators that target FNIP1 and/or FNIP2 proteins.

[0246] In some embodiments, methods of development of small molecule modulators that target nucleic acids encoding FNIP1 and/or FNIP2 include computational methods. Computational methods described by Manigrasso et al. (Manigrasso et al., Chem, 7(11): 2965-2988 (2021)) are representative of some of the computational methods available, and this reference along with references cited therein, are incorporated by reference herein. In one embodiment, the 2D and/or 3D structure of a target region of a nucleic acid encoding FNIP1 and/or FNIP2 is computationally predicted. In one embodiment, the 2D and/or 3D structure of a target region of a nucleic acid encoding FNIP1 and/or FNIP2 is determined using one or more experimental methods that are well known in the art, including but not limited to, NMR, SHAPE, X-ray crystallography, etc. In one embodiment, a computational library of small molecule modulators is computationally docked individually with a target region of a nucleic acid encoding FNIP1 and/or FNIP2. In one embodiment, a computational method is used to determine the binding energy of each small molecule modulator to a target region of a nucleic acid encoding FNIP1 and/or FNIP2. In yet another embodiment, new small molecule modulators are created for computational screening from an amalgamation of existing molecules or atoms from one or more databases. In certain embodiments, small molecule modulators that are predicted to have favorable binding energies to a target region of a nucleic acid encoding FNIP1 and/or FNIP2 are prioritized for further analysis and development.

[0247] In some embodiments, methods of development of small molecule modulators that target FNIP1 and/or FNIP2 proteins include computational methods. Computational methods described by Mendez-Lucio et al. (Mendez-Lucio et al., Nature Communications, 11, 10 (2020)), Dallakyan and Olson (Dallakyan and Olson, Hempel et al. (ed.) Chemical Biology: Methods and Protocols, Chapter 19, Methods in Molecular Biology pg 243-250 (2015)), Zoete et al. (Zoete et al., Journal of Chemical Information and Modeling, 56: 1399-1404 (2016)), and Merk et al. (Merk et al., Molecular Informatics, 37: 1700153 (2018)) are representative of some of the computational methods available, and these reference along with references cited therein, are incorporated by reference herein. In one embodiment, a computational library of small molecule modulators is computationally docked individually with a target protein, such as FNIP1 and/or FNIP2. In one embodiment, a computational method is used to determine the binding energy of each small molecule modulator to a target protein, such as FNIP1 and/or FNIP2. In yet another embodiment, new small molecule modulators are created for computational screening from an amalgamation of existing molecules or atoms from one or more databases. In certain embodiments, small molecule modulators that are predicted to have favorable binding energies to the target protein are prioritized for further analysis and development.

[0248] In certain embodiments, methods of development of small molecule modulators include high throughput biochemical screening methods, which are known to a person of ordinary skill in the art. Physical libraries of small molecules are built or obtained from commercially available sources. These libraries are screened against a target molecule of choice, such as a nucleic acid encoding FNIP1 and/or FNIP2, or FNIP1 and/or FNIP2 protein, by introducing the small molecules to the target molecule of choice and then implementing a washing or separating method to determine binding affinity and/or specificity. A biochemical or cell-based assay or a series of biochemical or cell-based assays can be used to determine structural and chemical properties of the small molecules or molecular complexes that are formed between the small molecule and the target molecule of choice. Controls or negative selection steps can be used to screen out small molecules with off-target binding activity to other molecules that are not the target molecule of choice. Further, screening at different concentrations of the small molecule against the target molecule of choice is used to determine other properties such as IC50, EC50, potency, and the like. Further description of methods and procedures for developing small molecule modulators via high-throughput screening are described by Cronk (Cronk, Drug Discovery and Development (Second Edition) Chapter 8, pp. 95-117 (2013)), which along with references cited therein, are incorporated by reference in its entirety and are known to a person of ordinary skill in the art. Other methods are well known to a person of ordinary skill in the art and are included in various embodiments herein.

[0249] In certain embodiments, methods of development of small molecule modulators include fragment-based discovery techniques that are known to a person of ordinary skill in the art. These methods involve screening of a library of small molecular fragments that contain one or more binding epitopes for binding affinity and/or specificity to a target molecule, such as a nucleic acid encoding FNIP1 and/or FNIP2, or FNIP1 and/or FNIP2 protein. Typically, the small molecular fragments have a molecular mass of around 120-250 daltons. In certain cases, these fragment-based discovery methods are combined with computational methods, some of which are described below. Examples of fragment-based discovery techniques include lead identification by fragment evolution, lead identification by fragment linking, lead identification by fragment self-assembly, and lead progression by fragment optimization, which are described herein. Often, assessment of target molecule binding sites, the development of fragment complexes, and subsequent determination of efficacy or specificity of binding is informed by structural, morphological, and chemical data acquired from assessment tools such as nuclear magnetic resonance spectroscopy, mass spectrometry, or X-ray crystallography.

[0250] In lead identification by fragment evolution, a library of fragments is applied to the target molecule of choice, and the strength and specificity of binding is determined. The fragments with higher binding specificity are then reacted or evolved with various other fragments to form fragment complexes that are screened for having even higher binding specificity.

[0251] In lead identification by fragment linking, fragment libraries are screened through multiple binding sites of a target molecule of choice for binding specificity. Two or more fragments with high binding specificity to two or more nearby binding sites on a target molecule of choice are chemically linked together.

[0252] In lead identification by fragment self-assembly, also termed combinatorial chemistry, a library of fragments capable of self-assembly is introduced to a target molecule of choice. The fragments are allowed to bind to the target molecule of choice in a manner that produces a complex that inhibits the expression or activity of the target molecule of choice. The various fragments are capable of assembling together while bound to the target molecule of choice via complementary reactive groups. Once assembled, these fragment complexes can then be isolated to assess their chemical and structural properties.

[0253] In lead progression by fragment optimization, a library of fragments is used to modify the properties of an existing modulator or fragment complex. Typically, this method is used to address the optimization of certain properties, such as selectivity, solubility, stability, or efficacy.

[0254] Examples and further discussion of methods and procedures for the development of small molecule modulators via fragment-based discovery are described by Rees et al. (Rees et al., Nature Reviews Drug Discovery, 3(8): 660 (2004)), Erlanson et al. (Erlanson et al., Journal of Medicinal Chemistry, 47(14): 3463-3482 (2004)), and Congreve et al. (Congreve et al., Journal of Medicinal Chemistry, 51(13): 3661-3680 (2008)), all of which along with references cited therein, are incorporated by reference in its entirety and are known to a person of ordinary skill in the art. Other methods are well known to a person of ordinary skill in the art and are included in various embodiments herein.

### Antibody and Related Protein

[0255] In certain embodiments, provided herein are methods of development of antibody and other related protein modulators that are capable of targeting FNIP1 and/or FNIP2, or its associated genes or pathways, thereby modulating the expression or activity of FNIP1 and/or FNIP2. In some embodiments, computational methods are used to develop antibody and related protein modulators. Computational methods as described by Chevalier et al. (Chevalier et al., Nature, 550, 7674 (2017)) are representative of some of the computational methods available, and this reference along with references cited therein, are incorporated by reference herein. In other embodiments, biochemical methods are used to develop, screen and produce antibody or related protein modulators. Such methods use a common set of methods that are known to a person of ordinary skill in the art. Throughout this specification, the antibodies referred to include all forms of antibodies, including but not limited to, monoclonal antibodies, polyclonal antibodies, chimeric antibodies, humanized antibodies, antibody fragments, and monobodies.

[0256] In certain embodiments, antibodies are developed by introducing an antigen that activates an immunological response in an animal species, such as, but not limited to, rabbit, mouse, rat, hamster, guinea pig, goat, sheep, chicken, or humans, and harvesting the resulting antibodies from blood or, in some cases, eggs, tissue, or other fluids. In certain embodiments, an adjuvant is also used alongside the antigen to increase the level of immunological response. Examples of commonly used adjuvants include, but are not limited to, Freund's complete adjuvant, Freund's incomplete adjuvant, aluminum salts, Quil A, Iscoms, Montanide, TiterMax, and RIBI.

[0257] Methods of development or production of polyclonal antibodies are known to persons skilled in the art. One such process can include either single or multiple introductions of at least one antigen or antigen/adjuvant mixture into the animal species of choice, clinical monitoring of antibody levels, and antibody collection once sufficient antibody levels are reached.

[0258] Methods of development or production of monoclonal antibodies are known to persons skilled in the art. In one common embodiment, BALB/c mice are used as the animal species for antigen injection, although other species mentioned above can be used. One such process can include either single or multiple introductions of at least one antigen or antigen/adjuvant mixture into the animal species of choice and clinical monitoring of antibody levels. A final injection of just antigen with no adjuvant is typically administered prior to harvesting B cells from the animal. The B cells are fused with non-secreting myeloma cells to form hybridoma B cells, which are cloned and selected for antigen specificity to a target molecule using one of any number of screening methods known to persons skilled in the art. Typical production processes utilize antigen-specific hybridoma B cells to generate identical copies of the antibody. Other methods, such as in vitro display selection (see below), can be used for the development of monoclonal antibodies and are known to a person of ordinary skill in the art.

[0259] In certain embodiments, provided herein are methods to further increase production levels of monoclonal antibodies. In the ascites method, the chosen monoclonal antibody-producing hybridoma cells are isolated and injected into an animal species, such as mice, which instigates the growth of ascites in areas, such as the abdominal cavity. In certain cases, a priming agent, such as pristine, is first injected into the animal to suppress immune response, promote the secretion of serous fluid, and slow hybridoma cell clearance. After incubation for several days to weeks, antibodies can be extracted from the animal directly from the ascites. In in vitro methods for increasing production levels of monoclonal antibodies, the chosen monoclonal antibody-producing hybridoma cells are isolated and cultured, often in a nutrient medium and/or serum. Single-compartment culture systems, such as culture flasks, roller bottles, or gas-permeable bags can be used for smaller scale production. In larger scale production, double-compartment culture systems, such as hollow-fiber systems, fermenters, perfusion-tank systems, airlift reactors, or continuous-culture systems can be used.

[0260] In certain embodiments, provided herein are methods for the development or production of chimeric or humanized antibodies, which are known in the art. The development or production of chimeric or humanized antibodies can be accomplished through genetic engineering of an animal genome to contain human or human-like coding segments in the antibody. Further modification of antibodies can also be effected by genetic engineering of the genome of B cells, hybridoma cells, or vectors.

[0261] A 1999 report by the National Research Council (Monoclonal Antibody Production: A Report of the Committee on Methods of Producing Monoclonal Antibodies, Institute for Laboratory Animal Research, National Research Council (1999)) and an article by Leenars and Hendriksen (Leenars and Hendriksen, Ilar Journal, 46(3): 269-279 (2005)) detail further certain procedures for synthesizing antibodies, both of which along with references cited therein, are incorporated by reference in their entirety and are known to a person of ordinary skill in the art. Cell-free antibody synthesis procedures are described by Stech and Kubick (Stech and Kubick, Antibodies, 4: 12-33 (2015)), which along with references cited therein, is incorporated by reference in its entirety and are known to a person of ordinary skill in the art.

[0262] In one embodiment, an antibody modulator is screened for and developed using an antibody development, screening, or production method, or any combination of methods thereof detailed above.

### Aptamer

[0263] In certain embodiments, provided herein are methods of development of aptamer modulators, including oligonucleotide, oligopeptide, or polypeptide aptamers, which are capable of targeting FNIP1 and/or FNIP2, or its associated genes or pathways, thereby modulating the expression or activity of FNIP1 and/or FNIP2. In certain embodiments, in vitro selection, also referred to as SELEX or in vitro evolution, can be used to develop and screen for aptamer modulators, such as oligonucleotide aptamers, which have strong binding affinities to a target molecule of choice, such as FNIP1 and/or FNIP2. In vitro selection methods are known to a person of ordinary skill in the art, and are incorporated in certain embodiments herein. In the first step, a large population of degenerate oligonucleotides is synthesized and amplified to create an oligonucleotide library using polymerase chain reaction. In the second step, the oligonucleotide library is treated with a change in temperature to renature the oligonucleotide library into stable secondary or tertiary structures. In the third step, the oligonucleotide library is introduced to the target molecule of choice, which has been immobilized to a substrate. In the fourth step, the oligonucleotides that are bound to the target molecule of choice are isolated from the rest of the oligonucleotide library via a washing method or other related method. In the fifth step, the oligonucleotides that are bound to the target molecule of choice are eluted from the target molecule of choice, typically using an oligonucleotide denaturing method such as high temperature or application of denaturing solutions, and isolated. In the sixth step, the oligonucleotides are further amplified by polymerase chain reaction and converted into the desired oligonucleotide format (e.g., single-stranded DNA, single-stranded RNA, or other oligonucleotide format). In the seventh step, the second step through the sixth step are repeatedly cycled until the desired specificity and/or binding affinity of the oligonucleotides to the target molecule of choice is reached. In certain instances, a negative selection step can be implemented between repeated cycles during which other target molecules can be used to bind to and remove oligonucleotides with specificity to those other target molecules. Other methods are well known to a person of ordinary skill in the art and are included in various embodiments.

[0264] In certain embodiments, provided herein are methods of in vitro display to develop and screen for oligopeptide and polypeptide aptamers that have strong binding affinities to a target molecule of choice, such as FNIP1 and/or FNIP2. In vitro display methods are known to a person of ordinary skill in the art and include, but are not limited to, phage display, cell surface display, ribosome display, mRNA display, DNA display, and in vitro compartmentalization.

[0265] Phage display can be used as a selection process that identifies and screens the binding affinity and specificity of a collection of oligopeptide or polypeptide aptamers to a target molecule of choice, using common strains of bacteriophage (e.g., M13, fd, or f1) as a means of surface peptide display. In the first step, a combinatorial library of oligopeptide or polypeptide fragments is identified, and a nucleotide library is built encoding the combinatorial library of peptide fragments. In the second step, the nucleotide sequences from the nucleotide library are coupled to nucleotide sequences encoding the major or minor coat proteins in the genome of the bacteriophage of choice. In the third step, the bacteriophages are introduced into a bacteria host (e.g., E. coli) to be replicated. The bacteriophages that are replicated express the various peptide fragments from the combinatorial library on the bacteriophage surface and contain the corresponding modified genome. In the fourth step, the bacteriophages are introduced to the target molecules of choice that have been immobilized on a substrate. In the fifth step, the bacteriophages that are bound to the target molecule of choice are isolated from the rest of the bacteriophages via a washing method or other related method. In the sixth step, the remaining, bound bacteriophages are eluted via a method such as increased temperature or a denaturing solution. In the seventh step, the eluted bacteriophages are cycled through the third through the sixth step until the desired level of binding affinity and/or specificity towards the target molecule of choice is achieved. In the eighth step, the genetic sequence of the polypeptide or oligopeptide aptamer with the desired level of specificity and/or binding affinity towards the target molecule of choice is isolated from the bacteriophage and can be used to produce additional copies of the polypeptide or oligopeptide aptamer. In certain instances, a negative selection step can be implemented between repeated cycles during which other target molecules can be used to bind to and remove polypeptide or oligopeptide aptamers with specificity to those other target molecules.

[0266] Cell surface display can be used as a selection process that identifies and screens the binding affinity and specificity of a collection of oligopeptide or polypeptide aptamers to a target molecule of choice using a cell or collection of cells (e.g., bacteria or yeast) as a means of surface peptide display. The selection process of aptamers using cell surface display is similar to that of phage display. In the first step, a combinatorial library of peptide fragments is identified, and the nucleotide library is built encoding the combinatorial library of peptide fragments. In the second step, the nucleotide sequences from the nucleotide library are coupled to nucleotide sequences encoding an outer membrane protein and introduced into the cell of choice, either through transformation, introduction via a vector, or other similar method known in the art. In the third step, the cell is allowed to replicate as well as to transcribe and translate the nucleotide sequence encoding the peptide fragment linked to an outer membrane protein such that the peptide fragment is displayed on the cell surface. In the fourth step, the cells are introduced to the target molecules of choice that have been immobilized on a substrate. In the fifth step, the cells that are bound to the target molecule of choice are isolated from the rest of the cells via a washing method or other related method. In the sixth step, the remaining, bound cells are eluted via a method such as increased temperature or a denaturing solution. In the seventh step, the eluted cells are cycled through the third through the sixth step until the desired level of specificity and/or binding affinity towards the target molecule of choice is achieved. In the eighth step, the genetic sequence of the polypeptide or oligopeptide aptamer with the desired level of specificity towards the target molecule of choice is isolated from the cell, which can be used to produce additional copies of the aptamer. In certain instances, a negative selection step can be implemented between repeated cycles during which other target molecules can be used to bind to and remove polypeptide or oligopeptide aptamers with specificity to those other target molecules.

[0267] Ribosome display can be used as a selection process that identifies and screens for polypeptide or oligopeptide aptamers that bind with high affinity and/or specificity to a target molecule of choice, such as FNIP1 and/or FNIP2. The ribosome display process involves a library of mRNA molecules that code for the library of aptamers identified for screening. These mRNA molecules are modified to have a ribosome binding site at the 5′ end and a spacer sequence with no stop codon on the 3′ end. In the first step, the modified mRNA molecules are prepared. In the second step, the modified mRNA molecules are translated in vitro, which causes an mRNA-peptide-ribosome complex to be formed. In the third step, the mRNA-peptide-ribosome complex is isolated and introduced to the target molecules of choice that have been immobilized on a substrate. In the fourth step, the complexes that bind to the target molecules of choice are sorted and isolated. In the fifth step, the isolated complexes bound to the target molecules of choice are eluted and dissociated, and the mRNA molecules that correspond to those complexes with preferential binding to the target molecules of choice are recovered. In the sixth step, those mRNA molecules are reverse transcribed and amplified via polymerase chain reaction to produce DNA sequences encoding aptamers with high specificity and/or binding affinity to the target molecules of choice. In the seventh step, the first step through the sixth step are repeated using the nucleotides obtained from the previous sixth step until the desired level of specificity and/or affinity towards the target molecules of choice is obtained. The genetic sequence of the aptamer can then be used to produce additional copies of the aptamer. In certain instances, a negative selection step can be implemented between repeated cycles during which other target molecules can be used to bind to and remove polypeptide or oligopeptide aptamers with specificity to those other target molecules.

[0268] mRNA display can be used as a selection process that identifies and screens for polypeptide or oligopeptide aptamers that bind with high affinity and/or specificity to a target molecule of choice, such as FNIP1 and/or FNIP2. The mRNA display process involves creating a library of mRNA molecules that code for the library of aptamers identified for screening. These mRNA molecules are modified to have a short DNA linker with puromycin at the 3′ end. In the first step, these modified mRNA molecules are prepared. In the second step, the modified mRNA molecules are translated in vitro, which causes an mRNA-peptide complex to be formed from the reaction between puromycin and the nascent polypeptide. In the third step, the mRNA-peptide complex is isolated and introduced to the target molecules of choice that have been immobilized on a substrate. In the fourth step, the complexes that bind to the target molecules of choice are sorted and isolated. In the fifth step, the isolated complexes bound to the target molecules of choice are eluted and dissociated, and the mRNA molecules that encode for oligopeptide or polypeptide aptamers with high affinity and/or specificity to the target molecules of choice are recovered. In the sixth step, those mRNA molecules are reverse transcribed and amplified via polymerase chain reaction to form DNA sequence encoding the aptamers. In the seventh step, the first step through the sixth step are repeated using the nucleotides obtained from the previous sixth step until the desired level of specificity and/or affinity towards the target molecules of choice is obtained. The genetic sequence of the aptamer can then be used to produce additional copies of the aptamer. In certain instances, a negative selection step can be implemented between repeated cycles during which other target molecules can be used to bind to and remove polypeptide or oligopeptide aptamers with specificity to those other target molecules.

[0269] DNA display can be used as a selection process that identifies and screens for polypeptide or oligopeptide aptamers that bind with high affinity and/or specificity to a target molecule of choice, such as FNIP1 and/or FNIP2. The DNA display process involves a library of DNA sequences that code for the library of aptamers identified for screening linked to DNA sequence encoding the protein streptavidin, which forms the conjugate. These DNA sequences are further labeled with biotin. In the first step, the modified DNA sequences are prepared, and mRNA molecules are transcribed from these DNA sequences in separate compartments containing on average one member of the DNA library. In the second step, the mRNA molecules are translated in vitro, which produces a polypeptide or oligopeptide aptamer linked to streptavidin, which binds to the biotin-labeled DNA. In the third step, the DNA-peptide complex is isolated and introduced to the target molecules of choice that have been immobilized on a substrate. In the fourth step, the complexes that bind to the target molecules of choice are sorted and isolated. In the fifth step, the isolated complexes bound to the target molecules of choice are eluted and dissociated, and the DNA molecules that encode the aptamers with preferential binding to the target molecules of choice are recovered. In the sixth step, those DNA molecules are amplified via polymerase chain reaction to obtain the genetic sequence of aptamers that possess high binding affinity and/or specificity to the target molecules of choice. In the seventh step, the first step through the sixth step are repeated using the nucleotides obtained from the previous sixth step until the desired level of specificity and/or affinity towards the target molecules of choice is obtained. The genetic sequence of the aptamer can then be used to produce additional copies of the aptamer. In certain variations of this method, a different pair of molecules with high binding affinity to each other, besides streptavidin and biotin, can be used for both attachment to the DNA sequence and its corresponding conjugate that is translated from the DNA sequence that is linked to the aptamer. These are able to create similar DNA-peptide complexes described above. In other variations, puromycin or other similar protein can be attached to the DNA sequence. The puromycin can bind directly to the nascent protein without the need for a conjugate polypeptide strand to form a DNA-peptide complex, as described by Chen et al. (Chen et al., RSC Advances 3, 16251 (2013)). In certain instances, a negative selection step can be implemented between repeated cycles during which other target molecules can be used to bind to and remove polypeptide or oligopeptide aptamers with specificity to those other target molecules. Other methods are well known to a person of ordinary skill in the art and are included in various embodiments herein.

### Gene Therapy

[0270] In certain embodiments, provided herein are methods of development of molecules for gene therapy to modulate the expression or activity of FNIP1 and/or FNIP2. Methods of development of molecules for gene therapy are known in the art and are included in various embodiments herein. In the case of developing gene therapy where the goal is gene augmentation, a nucleotide sequence encoding one or more functional copies of the gene of interest, such as FNIP1 and/or FNIP2, can be inserted into a nucleic acid vector. In one embodiment, functional copies of the gene are placed under control of appropriate regulatory elements, such as a cell or tissue-specific promoter, wherein the gene is expressed at appropriate levels and/or at appropriate times and/or in appropriate cells or tissues to exert a beneficial or therapeutic effect for a disease. In one embodiment, the promoter is a CNS-specific promoter. In another embodiment, a modulator that can increase the activity or expression of the gene of interest is inserted into a nucleic acid vector. In another embodiment, the nucleic acid vector carrying the gene of interest or other modulator is designed to target a specific tissue, such as by selecting an appropriate viral vector that is specific to a particular tissue, or by any other means known in the art. In the case of developing gene therapy where the goal is gene suppression, a nucleotide sequence encoding at least one modulator that can suppress the expression, or the activity of the gene of interest, such as FNIP1 and/or FNIP2, is inserted into a nucleic acid vector. Methods of development of gene therapy for clinical applications are described in Sung et al. (Sung et al., Biomaterials Research, 23, Article number: 8 (2019)) and Kumar et al. (Kumar et al., Mol. Ther. Methods Clin. Dev., 3, 16034 (2016)), which together with the references cited therein, are incorporated herein in their entirety.

[0271] In the case of developing gene therapy where the goal is gene editing, the development method depends on the particular endonuclease system and desired effects on the cell. A key consideration is ensuring the specificity of targeting of the endonuclease to a specific DNA or RNA sequence, in order to reduce side effects from mis-targeting of the endonuclease. In the case of Transcription activator-like effector nucleases (TALEs/TALENs), DNA specificity is determined by a DNA Binding Domain (DBD) containing on average 1.5-33.5 tandem repeats of 34 amino acid sequences (termed monomers), wherein each monomer recognizes a specific nucleotide. Although the sequence of each monomer is highly conserved, they differ primarily in two positions (the 12th and 13th) named as repeat variable di-residues (RVDs). Recent reports have found that the identity of these two residues determines the nucleotide binding specificity of each TALE repeat in a simple cipher that specifies the target base of each RVD (NI=A, HD=C, NG=T, NN=G). Thus, each monomer targets one nucleotide, and the linear sequence of monomers in a TALE specifies the target DNA sequence in the 5′ to 3′ direction. In one embodiment, a computational method is employed to design an appropriate sequence of monomers in a TALE to target a specific DNA sequence. Methods for developing TALE/TALENs are described in Zhang et al. (Zhang et al., Molecular Therapy: Methods & Clinical Development, 13, 310-320 (2019)), which along with references cited therein, is incorporated by reference herein in their entirety. Although less modular than TALENs, Zinc-finger nucleases (ZFN) can be designed to target a specific DNA sequence through a combination of certain design rules coupled with in vitro selection techniques. Such development and screening methods for ZFNs are described in detail in Chandrasegaran and Carroll (Chandrasegaran and Carroll, Journal of Molecular Biology, 428(5), 963-989 (2016)), which along with the references cited therein, are incorporated by reference in its entirety herein.

[0272] In one embodiment of the CRISPR system, the specificity of targeting is determined by a gRNA, which directs the endonuclease to bind to a specific DNA or RNA sequence that is complementary to the gRNA. Several studies have established key rules for the design of gRNA to increase the specificity of targeting a nucleotide sequence. For example, in the case of the Cas9 nuclease, a canonical protospacer adjacent motif (PAM) site comprising the nucleotides NGG, where N is any nucleobase, must be present immediately 3′ to the sequence that is targeted by the gRNA. In the case of the Cpf1 (Cas12a) nuclease, the PAM comprises “TTTN” or “YTN”. In addition, key rules for optimizing gRNA design include avoiding poly-T sequences, limiting the GC content and avoiding a G immediately upstream of the PAM (i.e., a GNGG motif). Furthermore, it is important to check for potential off-target sites that are similar in sequence to the target site. Several computational tools have been developed for the design and/or screening of specific gRNAs and the prediction of off-target sites. Such development and screening methods for CRISPR-Cas9 are described in Wilson et al. (Wilson et al., Frontiers in Pharmacology, 9, 749 (2018)), which along with the references cited therein, are incorporated by reference herein in its entirety.

### Diagnostics and Testing

[0273] In some embodiments, measuring and detecting an increase in expression levels of FNIP1 and/or FNIP2, or measuring and detecting an increase in activity of FNIP1 and/or FNIP2, can be used to determine an increased risk for or increased susceptibility to ALS. In certain embodiments, measuring and detecting an increase in signaling through FNIP1 and/or FNIP2 can be used to determine an increased risk for or increased susceptibility to ALS. In certain embodiments, measuring and detecting an increase in signaling through a pathway associated with FNIP1 and/or FNIP2, can be used to determine an increased risk for, or increased susceptibility to ALS. In some embodiments, measuring and detecting a decrease in expression levels of FNIP1 and/or FNIP2, or measuring and detecting a decrease in activity of FNIP1 and/or FNIP2, can be used to determine a decreased risk for, or decreased susceptibility to ALS. In certain embodiments, measuring and detecting a decrease in signaling through FNIP1 and/or FNIP2 can be used to determine a decreased risk for, or decreased susceptibility to ALS. In certain embodiments, measuring and detecting a decrease in signaling through a pathway associated with FNIP1 and/or FNIP2, can be used to determine a decreased risk for, or decreased susceptibility to ALS.

[0274] In certain embodiments, measuring and detecting an increase in expression or activity of FNIP1 and/or FNIP2, or an increase in signaling through a pathway associated with FNIP1 and/or FNIP2, can be used to determine an increased risk for or increased susceptibility to neuromuscular or neurodegenerative diseases, such as ALS, FTLD, Alzheimer's disease, retinal degeneration diseases such as age-related macular degeneration (AMD), or other TDP-43 proteinopathies; as well as oxidative stress, obesity, anemia or ischemic diseases, such as cardiovascular disease, myocardial ischemia and peripheral vascular disease. In other embodiments, measuring and detecting a decrease in expression or activity of FNIP1 and/or FNIP2, or a decrease in signaling through a pathway associated with FNIP1 and/or FNIP2, can be used to determine an increased risk for or increased susceptibility to inflammatory diseases, von Hippel-Lindau (VHL) disease, Birt-Hogg-Dube (BHD) syndrome, spontaneous pneumothorax, B cell deficiency, cardiomyopathy, as well as cancers such as fibrofolliculomas, kidney tumors, clear cell renal cell carcinoma, multilocular clear cell renal carcinoma, chromophobe renal cell carcinoma, renal oncocytic hybrid carcinoma, bladder cancer, uterine corpus endometrioid cancer, interdigitating dendritic cell sarcoma, hemangioblastomas, pancreatic neuroendocrine tumors, pheochromocytomas, endolymphatic sac tumors, kidney cysts, and lung cysts.

[0275] In one embodiment, a diagnostic method for determining a subject's susceptibility to a disease comprises obtaining nucleic acid sequence data from that subject, detecting the presence or absence of at least one allele of at least one polymorphic marker (or markers in linkage disequilibrium therewith) present within at least one genomic region associated with FNIP1 and/or FNIP2, such as but not limited to genomic regions found in SEQ ID NOs: 1-15, wherein different alleles are associated with different susceptibilities to the disease, and determining a susceptibility to the disease from the nucleic acid sequence data. In one embodiment, the at least one allele associated with susceptibility to a disease is present within an exon of FNIP1 and/or FNIP2 described by SEQ ID NOs: 1-15 that encodes for the FNIP1 and/or FNIP2 protein. In another embodiment, the at least one allele associated with susceptibility to a disease is located within a non-exonic (i.e. non-coding) region of FNIP1 and/or FNIP2 that affects the expression of FNIP1 and/or FNIP2, such as, for example, a promoter, an enhancer, an intron, a 5′ UTR or a 3′ UTR. In another embodiment, a diagnostic method for determining a subject's susceptibility to a disease comprises obtaining a sample, including from tissue, fluids, or other sample containing cellular material, from a subject, analyzing the sample for concentration and/or polymorph(s) of FNIP1 and/or FNIP2 protein, comparing to known and/or calibrated control samples, and determining a susceptibility to the disease. In yet another embodiment, a diagnostic method for determining a subject's susceptibility to a disease comprises obtaining nucleic acid sequence data from the subject, such as for example RNA-seq or cDNA data, detecting the expression levels of at least one transcript that is associated with a sequence described by SEQ ID NOs: 1-15, wherein different expression levels of the transcript(s) are associated with different susceptibilities to the disease, and determining a susceptibility to the disease from the nucleic acid sequence data.

[0276] In certain embodiments, the methods of determining risk or susceptibility to a disease, or methods of diagnosis of a disease stated above, can be applied to predict prognosis of a human individual diagnosed with, or experiencing symptoms associated with, the disease. In other embodiments, the methods of determining risk or susceptibility to a disease, or methods of diagnosis of a disease stated above, can be used to assess a human individual for a probability of a response to a therapeutic method and/or modulator used to treat, prevent or ameliorate symptoms associated with the disease. In one embodiment, such methods can be used to select a modulator used in treating a subject with the disease.

[0277] In one embodiment, the disease is ALS. In other embodiments, the disease is an inflammatory disease, von Hippel-Lindau (VHL) disease, Birt-Hogg-Dube (BHD) syndrome, spontaneous pneumothorax, B cell deficiency, cardiomyopathy, or cancer described herein. In yet other embodiments, the methods of determining risk or susceptibility to ALS, or methods of diagnosis of ALS, or methods of predicting prognosis of a human individual diagnosed with, or experiencing symptoms associated with ALS, or methods of assessing a human individual for a probability of a response to a therapeutic method and/or modulator used to treat, prevent or ameliorate symptoms associated with ALS, can be applied to other diseases, particularly neuromuscular or neurodegenerative diseases, such as, for example, FTLD, Alzheimer's Disease, retinal degeneration diseases such as age-related macular degeneration (AMD), and other TDP-43 proteinopathies disclosed herein; as well as oxidative stress, obesity, anemia or ischemic diseases, such as cardiovascular disease, myocardial ischemia, or peripheral vascular disease.

### Kits

[0278] Some embodiments also relate to kits and apparatuses for determining susceptibility of a human individual to a disease; or for diagnosing the disease; or predicting prognosis of a human individual diagnosed with, or experiencing symptoms associated with a disease; or assessing a human individual for a probability of a response to a therapeutic method and/or modulator used to treat, prevent or ameliorate symptoms associated with a disease. In one embodiment, the disease is ALS. In some embodiments, the disease is a neuromuscular or neurodegenerative disease, such as, for example, FTLD, Alzheimer's Disease, retinal degeneration disease such as age-related macular degeneration (AMD), and other TDP-43 proteinopathy disclosed herein; as well as oxidative stress, obesity, anemia or ischemic disease, such as cardiovascular disease, myocardial ischemia, or peripheral vascular disease. In other embodiments, the disease is an inflammatory disease, von Hippel-Lindau (VHL) disease, Birt-Hogg-Dube (BHD) syndrome, spontaneous pneumothorax, B cell deficiency, cardiomyopathy, or cancer described herein.

[0279] Kits that are useful in any of the methods described herein can comprise of any component that is useful in any of the methods described herein, including but not limited to probes (e.g., hybridization probes, allele-specific oligonucleotides), enzymes (e.g., for RFLP analysis, activity assays), reagents for amplification of nucleic acids, reagents for direct analysis of at least one allele of at least one polymorphic marker within or associated with FNIP1 and/or FNIP2, reagents for indirect analysis of at least one allele of at least one polymorphic marker within or associated with FNIP1 and/or FNIP2, etc. In one embodiment, the kit can include necessary buffers. In another embodiment, the kit can additionally provide reagents for other disease-specific diagnostic methods known in the art to be carried out in conjunction with the methods described herein.

[0280] In certain embodiments, the reagents in the kits include at least one contiguous oligonucleotide, such as for example described in SEQ ID NOs: 16-1494, which is capable of hybridizing to a fragment of the genome of the individual containing at least one allele of at least one polymorphic marker within or associated with FNIP1 and/or FNIP2, or markers in linkage disequilibrium therewith. In another embodiment, the reagents in the kits comprise at least two oligonucleotide primers, such as for example described in SEQ ID NOs: 16-1494, which are designed to amplify a fragment of the genome of the individual containing at least one allele of at least one polymorphic marker within or associated with FNIP1 and/or FNIP2, or markers in linkage disequilibrium therewith. Furthermore, the oligonucleotide(s) in the kits can contain mismatches to the fragment of the genome, as is well known to a skilled person in the art. In another embodiment, the kit comprises at least one or more labeled oligonucleotides and reagents for detection of the label. Suitable labels can include but are not limited to a radioisotope, a fluorescent label, an enzyme label, an enzyme co-factor label, a magnetic label, a spin label, or an epitope label.

[0281] In some embodiments, the kits and apparatuses include a collection of data comprising correlation data between the at least one allele of at least one polymorphic marker within or associated with FNIP1 and/or FNIP2 that is selectively assessed by the kit and susceptibility to a disease, or prognosis for the disease, or response to at least one therapy for the disease. In certain embodiments, the kits and apparatuses include a collection of data comprising correlation data between the expression levels of at least one transcript associated with a sequence described by SEQ ID NOs: 1-15 that is selectively assessed by the kit, and susceptibility to a disease, or prognosis for the disease, or response to at least one therapy for the disease. Another set of embodiments relates to methods of use of at least one oligonucleotide probe in the manufacture of a diagnostic reagent for diagnosing and/or assessing the susceptibility to a disease in a human individual, wherein the probe is capable of hybridizing to a segment of a nucleic acid containing at least one allele of at least one polymorphic marker within or associated with FNIP1 and/or FNIP2, or markers in linkage disequilibrium therewith. In one embodiment, the segment is 15-500 nucleotides in length. In one embodiment, the kit further comprises a set of instructions for using the reagents comprising the kit. In another embodiment, the kit comprises a set of instructions or guidelines for interpreting the results of a test using the reagents comprising the kit.

[0282] A further set of embodiments provides for a kit (also referred to as a pharmaceutical pack and are used interchangeably) comprising a therapeutic modulator and a set of instructions for administration of the therapeutic modulator to a human. The therapeutic modulator can be an antisense modulator, antisense oligonucleotide, other oligonucleotide, a small molecule, an antibody, a peptide, a gene therapy, a nucleic acid vector, or other therapeutic modulator described herein. In one embodiment, an individual identified as a carrier of at least one allele of at least one polymorphic marker within or associated with FNIP1 and/or FNIP2, or markers in linkage disequilibrium therewith, is instructed to take a prescribed dose of the therapeutic modulator. In another embodiment, an individual identified as a homozygous carrier of at least one allele of at least one polymorphic marker within or associated with FNIP1 and/or FNIP2, or markers in linkage disequilibrium therewith, is instructed to take a prescribed dose of the therapeutic modulator. In another embodiment, an individual identified as a non-carrier of at least one allele of at least one polymorphic marker within or associated with FNIP1 and/or FNIP2, or markers in linkage disequilibrium therewith, is instructed to take a prescribed dose of the therapeutic agent.

### Computers-Readable Medium and Apparatuses

[0283] The materials, methods, and kits described herein can be implemented, in all or in part, as computer executable instructions on computer-readable media. As understood by a person skilled in the art, the various steps of the materials, methods and kits described herein can be implemented as various blocks, operations, routines, tools, modules and techniques, which in turn can be implemented in hardware, firmware, software, or any combination of hardware, firmware, and/or software. In certain embodiments, hardware implementations can include but are not limited to a custom integrated circuit (IC), an application specific integrated circuit (ASIC), a field programmable logic array (FPGA), a programmable logic array (PLA), etc. In other embodiments, when implemented as software, the software can be stored in any computer readable medium known in the art, including but not limited to a solid-state disk, a magnetic disk, an optical disk, or other storage medium, in a RAM or ROM or flash memory of a computer, processor, hard disk drive, thumb drive, optical disk drive, tape drive, etc. In one embodiment, the software can be delivered to a user or a computing system via any delivery method known in the art, including but not limited to over a communication channel such as the internet, a wireless connection, a satellite connection, a telephone line, a computer readable disk or other transportable computer storage mechanism.

[0284] One set of embodiments provides for a suitable computing system environment known in the art to implement the materials, methods and kits described herein, including but not limited to mobile phones, laptops, personal computers, server computers, multiprocessor systems, microprocessor-based systems, set top boxes, programmable consumer electronics, network PCs, minicomputers, mainframe computers, cloud computing environments, and distributed computing environments that include any of the above systems or devices, etc. In some embodiments, the steps of the materials, methods or kits described herein are implemented via computer-executable instructions such as program modules, including but not limited to routines, programs, objects, components, data structures, etc. that perform particular tasks or implement particular abstract data types. In one embodiment, the methods and apparatuses are practiced in a distributed computing environment, where tasks are performed by remote processing devices that are linked through a communications network. In one embodiment, the methods and apparatuses are practiced in an integrated computing environment. In both integrated and distributed computing environments, program modules can be located in both local and/or remote computer storage media, including memory storage devices.

[0285] Thus, one set of embodiments provides a computer-readable medium having computer executable instructions for determining the effect of administering a modulator to a cell an animal, or a human subject, the computer-readable medium comprising data indicative of the level of at least one protein, nucleotide, marker, or other phenotype, and a routine stored on the computer readable medium and adapted to be executed by a processor to determine the effect of administering the modulator from the data. In certain embodiments, the effect being determined is a change in levels of FNIP1 and/or FNIP2 RNA, or a change in levels of FNIP1 and/or FNIP2 protein, or a change in phenotype such as cell survival, cell morphology, levels of TDP-43 aggregates in the cytoplasm, activation levels of the HIFla-VEGF pathway, levels of angiogenesis, survival of the organism, motor function, respiration, behavior or body weight etc. In certain embodiments, the modulator is an antisense modulator, an antisense oligonucleotide, nucleic acid vector, other oligonucleotide modulator, antibody modulator, peptide modulator, or a small molecule modulator, etc. In one embodiment, the computer-readable medium is used to determine progression of a disease and its response to administration of a modulator described herein to a human subject.

[0286] Another set of embodiments provides for a computer-readable medium having computer executable instructions for developing a modulator using at least one computational method described herein, or other computational methods that are known to those skilled in the art, which are also included in the embodiments herein. The computer-readable medium can comprise data associated with a particular nucleotide sequence, SEQ ID NO, or oligonucleotide represented by a specific sample reference number (GiTx ID #), or portion thereof disclosed herein, as well as any resulting polypeptide sequences due to transcription and translation of said nucleotide sequences. The computer-readable medium can also be adapted to be executed by a processor to develop a modulator from said data.

[0287] Many modifications and variations can be made in the materials, methods, and kits described herein without departing from the spirit and scope of the invention. Accordingly, it should be understood that the materials, methods, and kits described herein are illustrative only and are not limiting upon the scope of the invention.

### EXAMPLES

[0288] The following examples are put forth so as to provide those of ordinary skill in the art with a complete disclosure and description of how to make and use the present invention, and are not intended to limit the scope of what the inventors regard as their invention, nor are the examples intended to represent or imply that the experiments below are all of or the only experiments performed. It will be appreciated by persons skilled in the art that numerous variations and/or modifications can be made to the invention as shown in the specific embodiments without departing from the spirit or scope of the invention as broadly described. It should also be appreciated that the examples provide enabling guidance on the use of the combined features of the disclosure to apply such compositions, methods and systems to other uses. The present embodiments are, therefore, to be considered in all respects as illustrative and not restrictive.

[0289] The examples can be implemented in certain embodiments by computers or other processing devices incorporating and/or running software, where the methods and features, software, and processors utilize specialized methods to analyze data.

[0290] Efforts have been made to ensure accuracy with respect to numbers used (e.g., amounts, intensity, temperature, etc.) but some experimental errors and deviations should be accounted for.

### Example 1: Antisense Modulation of Human FNIP1 and/or FNIP2 in ReN-VM Cells

[0291] In certain embodiments, provided herein are antisense modulators that are antisense oligonucleotides (ASOs), which are designed to target at least one region of at least one transcript produced from the FNIP1 gene (RefSeq Accession No. NC_000005.10 truncated from nucleotides 131639000 to 131799000, incorporated herein as SEQ ID NO: 11) and/or FNIP2 gene (the reverse complement of RefSeq Accession No. NC_000004.12 truncated from nucleotides 158767000 to 158910000, incorporated herein as SEQ ID NO: 1). In some embodiments, the antisense oligonucleotide has a nucleobase sequence that is at least 70%, at least 80%, at least 85%, at least 90%, at least 95%, at least 98%, or 100% complementary to an equal length portion of SEQ ID NO: 11. In other embodiments, the antisense oligonucleotide has a nucleobase sequence that is at least 70%, at least 80%, at least 85%, at least 90%, at least 95%, at least 98%, or 100% complementary to an equal length portion of SEQ ID NO: 1. In yet other embodiments, the antisense oligonucleotide comprises at least 8, or at least 12, consecutive nucleobases that are at least 70%, at least 80%, at least 85%, at least 90%, at least 95%, at least 98%, or 100% identical to an equal length portion of any of the nucleobase sequences of SEQ ID NOs: 16-1494. The following description of particular antisense oligonucleotides and their modifications are provided as examples only and are not meant to limit the scope of the invention.

[0292] In some embodiments, provided herein are antisense oligonucleotide modulators that increase the expression or activity of FNIP1 and/or FNIP2. Examples of antisense oligonucleotides that can increase the expression or activity of FNIP1 are described in Table 3. Examples of antisense oligonucleotide modulators that can increase the expression or activity of FNIP2 are described in Table 6. Bolded nucleosides presented in Table 3 and Table 6 indicate nucleosides that are modified with a 2′-MOE sugar modification. For example, GiTx-58, GiTx-59, GiTx-60, GiTx-61, GiTx-62, GiTx-63, GiTx-64, GiTx-65, GiTx-75, GiTx-76, GiTx-77, GiTx-78, GiTx-79 and GiTx-80 are antisense oligonucleotides wherein each nucleoside comprises a 2′-MOE sugar modification. In a preferred embodiment, antisense oligonucleotides that increase the expression or activity of FNIP1 and/or FNIP2 comprise a modified oligonucleotide wherein each internucleoside linkage is a phosphorothioate internucleoside linkage. In a preferred embodiment, antisense oligonucleotides that increase the expression or activity of FNIP1 and/or FNIP2 comprise a modified oligonucleotide wherein each nucleoside contains a modified sugar. In a preferred embodiment, antisense oligonucleotides that increase the expression or activity of FNIP1 and/or FNIP2 comprise a modified oligonucleotide wherein each nucleoside contains a 2′-MOE sugar modification.

[0293] In other embodiments, provided herein are antisense oligonucleotides that decrease the expression or activity of FNIP1 and/or FNIP2. Examples of antisense oligonucleotides that can decrease the expression or activity of FNIP1 are described in Table 2. Examples of antisense oligonucleotides that can decrease the expression or activity of FNIP2 are described in Table 5. Bolded nucleosides presented in Table 2 and Table 5 indicate nucleosides that are modified with a 2′-MOE sugar modification. For example, GiTx-51, GiTx-52, GiTx-53, GiTx-54, GiTx-55, GiTx-56, GiTx-57, GiTx-66, GiTx-68, GiTx-69 and GiTx-70 are antisense oligonucleotides wherein each nucleoside comprises a 2′-MOE sugar modification. Underlined nucleosides presented in Table 2 and Table 5 indicate non-modified DNA nucleosides. For example, GiTx-45, GiTx-46, GiTx-47, GiTx-48, GiTx-49, GiTx-50, GiTx-67, GiTx-71, GiTx-72, GiTx-73, and GiTx-74 are gapped sequences comprising a central sequence of unmodified DNA nucleosides flanked by wing sequences on both ends comprising nucleosides with a 2′-MOE sugar modification. In a preferred embodiment, antisense oligonucleotides that decrease the expression or activity of FNIP1 and/or FNIP2 comprise a modified oligonucleotide wherein each internucleoside linkage is a phosphorothioate internucleoside linkage. In a preferred embodiment, antisense oligonucleotides that decrease the expression or activity of FNIP1 and/or FNIP2 comprise a gapped sequence. In another preferred embodiment, antisense oligonucleotides that decrease the expression or activity of FNIP1 and/or FNIP2 comprise a modified oligonucleotide wherein each nucleoside contains a 2′-MOE sugar modification.

[0294] The effectiveness of the antisense oligonucleotides in increasing or decreasing the expression of FNIP1 and/or FNIP2 can be tested in mammalian cell lines, such as ReN-VM, HEK-293T, SHSY-5Y, B-35, NRK-49F, 3T3-L1, MEF, etc., according to established protocols. Cells can be seeded at 10,000 cells per well in a 96-well plate, or 50,000 cells per well in a 24-well plate, or 300,000 cells per well in a 6-well plate. After 1 day, antisense oligonucleotides at defined concentrations can be transfected into the cells with or without a transfection reagent such as Lipofectamine. After a 1 day incubation period, the cells can be harvested to obtain RNA. The RNA can be reverse transcribed to form cDNA. The cDNA can be analyzed by quantitative PCR (qPCR) to quantify the relative expression levels of FNIP1 and/or FNIP2 RNA and a control gene, such as beta-actin. The relative expression values of FNIP1 and/or FNIP2 RNA for the different treatment groups can be calculated by normalizing with their respective beta-actin loading control, and presented as a percentage to that of the untreated control (which can comprise cells not transfected with ASOs).

[0295] In addition, or alternatively, after a 1, 2 or 3-day incubation period, the cells can be harvested to obtain whole cell lysates. The whole cell lysates can be analyzed by Western blot and probed with an FNIP1 and/or FNIP2-specific antibody, such as described in Table 14. The intensity of Western blot bands can be quantified by FIJI (Image J) and used to quantify the expression levels of FNIP1 and/or FNIP2 protein. The relative expression values of FNIP1 and/or FNIP2 protein for the different treatment groups can be calculated by normalizing with their respective a-Tubulin loading control, and presented as a percentage to that of the untreated control (which can comprise cells not transfected with ASOs).

### Example 2: Modulation of Human FNIP1 and/or FNIP2 by RNAi

[0296] In certain embodiments, provided herein are antisense modulators that act via the RNAi pathway, such as siRNA and shRNA modulators, which are designed to target at least one region of at least one FNIP1 and/or FNIP2 transcript produced from the FNIP1 gene (RefSeq Accession No. NC_000005.10 truncated from nucleotides 131639000 to 131799000, incorporated herein as SEQ ID NO: 11) and/or FNIP2 gene (the reverse complement of RefSeq Accession No. NC_000004.12 truncated from nucleotides 158767000 to 158910000, incorporated herein as SEQ ID NO: 1). In some embodiments, the strand of the siRNA or shRNA that is antisense to the target has a nucleobase sequence that is at least 70%, at least 80%, at least 85%, at least 90%, at least 95%, at least 98%, or 100% complementary to an equal length portion of SEQ ID NO: 11. In other embodiments, the strand of the siRNA or shRNA that is antisense to the target has a nucleobase sequence that is at least 70%, at least 80%, at least 85%, at least 90%, at least 95%, at least 98%, or 100% complementary to an equal length portion of SEQ ID NO: 1. In yet other embodiments, the strand of the siRNA or shRNA that is antisense to the target comprises at least 8, or at least 12, consecutive nucleobases that are at least 70%, at least 80%, at least 85%, at least 90%, at least 95%, at least 98%, or 100% identical to an equal length portion of any of the nucleobase sequences of SEQ ID NOs: 16-1494, wherein thymine bases are replaced by uracil bases. In a preferred embodiment, provided herein are siRNA or shRNA modulators that decrease the expression or activity of FNIP1 and/or FNIP2. In one embodiment, provided herein are siRNA or shRNA modulators that increase the expression or activity of FNIP1 and/or FNIP2.

[0297] The siRNA or shRNA modulators can be tested in mammalian cell lines, such as ReN-VM, HEK-293T, SHSY-5Y, B-35, NRK-49F, 3T3-L1, MEF, etc., according to established protocols to evaluate their effectiveness in increasing or decreasing the expression of FNIP1 and/or FNIP2. Cells can be seeded at 10,000 cells per well in a 96-well plate, or 50,000 cells per well in a 24-well plate, or 300,000 cells per well in a 6-well plate. After 1 day, siRNA or shRNA at defined concentrations can be transfected into the cells with or without the use of a transfection reagent such as Lipofectamine. After a 1 day incubation period, the cells can be harvested to obtain RNA. The RNA can be reverse transcribed to form cDNA. The cDNA can be analyzed by quantitative PCR (qPCR) to quantify the relative expression levels of FNIP1 and/or FNIP2 RNA and a control gene, such as beta-actin. The relative expression values of FNIP1 and/or FNIP2 RNA for the different treatment groups can be calculated by normalizing with their respective beta-actin loading control, and presented as a percentage to that of the untreated control (which can comprise cells transfected with a non-targeting siRNA or shRNA).

[0298] In addition, or alternatively, after a 1, 2, or 3-day incubation period, the cells can be harvested to obtain whole cell lysates. The whole cell lysates can be analyzed by Western blot and probed with an FNIP1 and/or FNIP2-specific antibody, such as described in Table 14. The intensity of Western blot bands can be quantified by FIJI (Image J) and used to quantify the expression levels of FNIP1 and/or FNIP2 protein. The relative expression values can be calculated by normalizing the FNIP1 and/or FNIP2 bands with its respective α-Tubulin loading control, and presented as a percentage to that of the control, which can comprise cells transfected with a non-targeting siRNA control.

### Example 3: Human Stem Cell Models for Evaluating Therapies for Neurodegenerative Disease Such as ALS

[0299] In order to evaluate therapies for neurodegenerative diseases such as ALS, in particular to evaluate the modulation of human FNIP1 and/or FNIP2 as a therapy for ALS, several ALS induced pluripotent stem cell (iPSC) lines were obtained from various sources and propagated (Table 7). The cell lines GI-iPSC 2 and GI-iPSC 3, shown in Table 7, are isogenic ALS lines, which have been engineered to contain known disease-causing mutations in ALS genes such as the G298S mutation in TARDBP and the L144F mutation in SOD1 respectively (Hor et al., bioRxiv 713651 (2019)). GI-iPSC 4 through GI-iPSC 9 (commercially sourced), shown in Table 7, are cell lines that are derived from ALS patients with various known and unknown genetic mutations, such as C9orf72 repeat expansion, TARDBP or SOD1 mutations, or sporadic ALS cases with unknown genetic causes. GI-iPSC 1, GI-iPSC 10 and GI-iPSC 11, shown in Table 7, are healthy lines used as controls.

### Example 4: Effect of Modulation of Human FNIP1 and/or FNIP2 on Survival of Human ALS iPSC-Derived Motor Neurons

[0300] The assay described herein was performed to determine the effect of inhibition of human FNIP1 and/or FNIP2 leading to a decrease in expression and/or activity of FLCN, on the survival of human ALS iPSC-derived motor neurons. In this specific example, siRNAs targeting and inhibiting FLCN were used to study the effects of inhibition of FNIP1 and/or FNIP2 leading to a decrease in expression and/or activity of FLCN. Human ALS iPSCs were differentiated into motor neurons over a period of 28 days according to an established protocol (Hor et al., bioRxiv 713651 (2019)). On Day 28, motor neuron cells were transfected with 10 nM of commercially-sourced siRNA that was either validated to inhibit human FLCN (si-FLCN) or that served as the non-targeting control (si-NT) using Lipofectamine. The motor neuron cells were fixed with 4% paraformaldehyde on Days 28 and 31 for determination of motor neuron survival. The fixed motor neuron cells were stained with a specific antibody against the motor neuron marker ISL1, and cellular nuclei were counterstained with 4′,6-diamidino-2-phenylindole (DAPI) prior to imaging using the Opera Phenix High-content Screening System (Perkin Elmer). To calculate normalized survival index (NSI shown in Table 8) on Days 28 and 31, the ratio of ISL1+ cells (those cells stained with the ISL1 antibody) to DAPI-stained nuclei was determined and normalized against the ratio of ISL1+ cells to DAPI-stained nuclei for the healthy control motor neurons (BJ-iPS) at Day 28 (Table 8). Results shown in Table 8 are the average of at least 5 technical replicates.

[0301] The results indicate that treatment with si-FLCN can increase the survival of human ALS iPSC-derived motor neurons on Day 31, compared to treatment with the non-targeting control siRNA (si-NT) (Table 8). This suggests that inhibition of human FNIP1 and/or FNIP2 leading to a decrease in expression and/or activity of FLCN (via e.g., an antisense modulator, oligonucleotide modulator, nucleic acid vector, peptide modulator, antibody modulator, or small molecule modulator etc.) can promote the survival of human motor neuron cells. Furthermore, this effect can be observed in iPSC-derived motor neurons representing different ALS sub-types, including but not limited to the isogenic SOD1 (L144F), isogenic TDP-43 (G298S) and patient-derived sporadic ALS line (CS14isALS-Tn16) (Table 8). This finding suggests that decreasing the expression or activity of human FNIP1 and/or FNIP2 leading to a decrease in expression and/or activity of FLCN via a modulator, such as an antisense modulator, oligonucleotide modulator, nucleic acid vector, peptide modulator, antibody modulator, or small molecule modulator, can be an effective therapy for a broad subset of ALS patients, including, but not limited to, patients with mutations in known ALS genes such as SOD1, C9orf72 and TARDP43, as well as sporadic ALS patients with no known mutations in ALS genes.

### Example 5: Effect of Modulation of Human FNIP1 and/or FNIP2 on the Levels of Phosphorylated TDP-43 in the Cytoplasm of Human ALS iPSC-Derived Motor Neurons

[0302] The assay described herein was performed to determine the effect of inhibition of human FNIP1 and/or FNIP2 leading to a decrease in expression and/or activity of FLCN, on the levels of phosphorylated TDP-43 (pTDP-43) in the cytoplasm of human ALS iPSC-derived motor neurons. In this specific example, siRNAs targeting and inhibiting FLCN were used to study the effects of inhibition of FNIP1 and/or FNIP2 leading to a decrease in expression and/or activity of FLCN. Human ALS iPSCs were differentiated into motor neurons over a period of 28 days according to an established protocol (Hor et al., bioRxiv 713651 (2019)). On Day 28, motor neuron cells were transfected with 10 nM of commercially sourced siRNA that was either validated to inhibit human FLCN (si-FLCN) or that served as the non-targeting control (si-NT) using Lipofectamine. The motor neuron cells were fixed with 4% paraformaldehyde on Days 28 and 31 to determine the levels of pTDP-43 in the cytoplasm. The fixed motor neuron cells were stained with a specific antibody against the motor neuron marker ISL1, counterstained with DAPI, and also co-stained with a specific antibody against TDP-43 phosphorylated at Ser 409 or Ser 410, prior to imaging using the Opera Phenix High-content Screening System (Perkin Elmer). The number of pTDP-43 foci (spots) per unit area of cytoplasm, or the intensity of pTDP-43 staining in the cytoplasm, were quantified and used as a proxy for the levels of cytoplasmic pTDP-43. The levels of pTDP-43 in the cytoplasm on Days 28 and 31 for the different treatment groups were normalized against the cytoplasmic pTDP-43 levels in healthy control motor neurons (BJ-iPS) at Day 28 (Table 9). Results shown in Table 9 are the average of at least 5 technical replicates.

[0303] Over 97% of all ALS cases (both sporadic and familial) display pTDP-43 positive aggregates in the cytoplasm of affected neurons; cytoplasmic pTDP-43 aggregates have been associated with ALS pathology (Prasad et al., Frontiers in Molecular Neuroscience, 12:25 (2019)). The results shown in Table 9 indicate that cytoplasmic pTDP-43 levels are elevated to over eight-fold at Day 28 in all ALS iPSC-derived motor neurons compared to the healthy BJ-iPS control, including, but not limited to, the isogenic SOD1 (L144F), isogenic TDP-43 (G298S) and patient-derived sporadic ALS line (CS14isALS-Tn16). This finding suggests that the ALS iPSC-derived motor neurons can replicate important pathological features of ALS and can serve as a relevant disease model. Treatment of the ALS iPSC-derived motor neurons with si-FLCN but not si-NT reduced the levels of cytoplasmic pTDP-43 aggregates in those cells (Table 9). This suggests that decreasing the expression or activity of human FNIP1 and/or FNIP2 leading to a decrease in expression and/or activity of FLCN via a modulator, such as an antisense modulator, oligonucleotide modulator, nucleic acid vector, peptide modulator, antibody modulator, or small molecule modulator, can reduce the levels of pathological cytoplasmic pTDP-43 aggregates and potentially improve disease outcomes for ALS patients.

### Example 6: Identification of miRNA Modulators

[0304] miRNA modulators that are capable of targeting nucleic acids encoding FNIP1 and/or FNIP2 can be identified using various databases such as for example, miRDB, which is a database that contains predicted miRNA-gene target interactions (Chen et al., Nucleic Acids Research, 48: D127-D131 (2020)). In some embodiments, provided herein are miRNA modulators that can inhibit or decrease the expression or activity of FNIP1 and/or FNIP2. In other embodiments, provided herein are miRNA modulators that can increase the expression or activity of FNIP1 and/or FNIP2. miRNA modulators, their nucleobase sequences, and examples of predicted target sites in SEQ ID NO: 11, are disclosed herein in Table 10. miRNA modulators, their nucleobase sequences, and examples of predicted target sites in SEQ ID NO: 1, are disclosed herein in Table 11. In certain embodiments, miRNA modulators, or portions thereof, are at least 40%, 50%, 60%, 70%, 75%, 80%, 85%, 90%, 95%, 96%, 97%, 98%, 99%, or 100% identical to one or more particular miRNA sequences disclosed in Table 10 and/or Table 11. In one embodiment, a miRNA disclosed herein can be encoded by a nucleic acid vector and delivered into a cell, an animal or human, in order to inhibit the expression or activity of FNIP1 and/or FNIP2.

### Example 7: Identification of Small Molecule Modulators

[0305] Small molecule modulators that are capable of targeting nucleic acids encoding FNIP1 and/or FNIP2 were identified using methods of development described herein. In one embodiment, the target regions, or structurally defined regions of nucleic acids encoding FNIP1 and/or FNIP2, were first identified using computational tools well known in the art that predict the existence of a target region, and/or that predict the stability or structure of a nucleic acid region. Next, a high-throughput computational screen was performed to identify small molecule exemplars and small molecule scaffolds (otherwise known as pharmacophores) that can bind to each target region of a nucleic acid encoding FNIP1 and/or FNIP2. Small molecule exemplars with excellent predicted dissociation constants against a target region of a nucleic acid encoding FNIP1 (the lower the better) were identified and listed in Table 12. Small molecule exemplars with excellent predicted dissociation constants against a target region of a nucleic acid encoding FNIP2 (the lower the better) were identified and listed in Table 13.

[0306] Small molecule modulators that are capable of targeting FNIP1 and/or FNIP2 proteins were identified using methods of development described herein. Briefly, a high-throughput computational screen was performed to identify small molecule exemplars and small molecule scaffolds (otherwise known as pharmacophores) that can bind to the FNIP1 and/or FNIP2 proteins. X-ray crystal structures of the FNIP1 and FNIP2 proteins were obtained from the Protein Data Bank (PDB). The cavities on the surfaces of FNIP1 and FNIP2 that are amenable to small molecule binding were identified using established tools such as Autodock. Molecular docking was performed using computational databases of small molecule ligands, which include small molecule exemplars and scaffolds, to the identified cavities on the surfaces of the FNIP1 and FNIP2 proteins. Molecular docking was also performed using computational databases of small molecule ligands to the entire surfaces of the FNIP1 and FNIP2 proteins. Small molecule exemplars with excellent predicted dissociation constants with the FNIP1 protein (the lower the better) were identified and listed in Table 12. Small molecule exemplars with excellent predicted dissociation constants with the FNIP2 protein (the lower the better) were identified and listed in Table 13.

[0307] In certain embodiments, small molecule exemplars described in Table 12 and/or Table 13 can be used as modulators to increase the expression or activity of FNIP1 and/or FNIP2. In some embodiments, small molecule modulators that are similar in structure to the exemplars described in Table 12 and/or Table 13 can be used as modulators to increase the expression or activity of FNIP1 and/or FNIP2. In other embodiments, small molecule modulators that have a Tanimoto index of at least 0.20, 0.30, 0.40, 0.50, 0.60, 0.70, 0.75, 0.80, 0.85, 0.90, 0.95, 0.96, 0.97, 0.98, 0.99, or 1.00 compared to at least one exemplar or scaffold described in Table 12 and/or Table 13 can be used to increase the expression or activity of FNIP1 and/or FNIP2.

[0308] In other embodiments, small molecule exemplars described in Table 12 and/or Table 13 can be used as modulators to inhibit or decrease the expression or activity of FNIP1 and/or FNIP2. In some embodiments, small molecule modulators that are similar in structure to the exemplars described in Table 12 and/or Table 13 can be used as modulators to inhibit or decrease the expression or activity of FNIP1 and/or FNIP2. In other embodiments, small molecule modulators that have a Tanimoto index of at least 0.20, 0.30, 0.40, 0.50, 0.60, 0.70, 0.75, 0.80, 0.85, 0.90, 0.95, 0.96, 0.97, 0.98, 0.99, or 1.00 compared to at least one exemplar or scaffold described in Table 12 and/or Table 13 can be used to inhibit or decrease the expression or activity of FNIP1 and/or FNIP2.

### Example 8: Identification of Antibody or Peptide Modulators

[0309] Antibody modulators that are capable of targeting FNIP1 and/or FNIP2 can be identified from commercial sources and are disclosed in Table 14. In some embodiments, such antibodies can be capable of increasing the expression or activity of FNIP1 and/or FNIP2. In other embodiments, such antibodies can be capable of inhibiting or decreasing the expression or activity of FNIP1 and/or FNIP2. Furthermore, antibodies, antibody fragments, monobodies, or other peptide modulators comprising a CDR that is at least 30%, 40%, 50%, 60%, 70%, 75%, 80%, 85%, 90%, 95%, 96%, 97%, 98%, 99%, or 100% similar to the CDR of at least one antibody described in Table 14, as assessed by sequence alignment or other scoring methods known in the art, can be capable of increasing or decreasing the expression or activity of FNIP1 and/or FNIP2, and are included herein.

### Tables

TABLE 1
Example antisense oligonucleotide modulators targeting SEQ ID NO: 11

| | | Target start | Target stop | | |
|---|---|---|---|---|---|
| | | site with | site with | | |
| | | reference to | reference to | | |
| | | SEQ ID | SEQ ID | Binding | SEQ ID |
| No | ASO sequence | NO: 11 | NO: 11 | Score | NO |
| 1 | CAGCTATGTACATATCCAAC | 157170 | 157189 | -26 | 16 |
| 2 | TAAGTGATCATCCCCAGAGT | 157072 | 157091 | -33.1 | 17 |
| 3 | GACCACACTTTAAAGTAGCA | 156769 | 156788 | -26.3 | 18 |
| 4 | GGAAGCAGTGGGGAGGAACA | 156654 | 156673 | -30.5 | 19 |
| 5 | TTGATGGTTAAGGAGACACC | 156468 | 156487 | -27.4 | 20 |
| 6 | GGCCCGCAAATGTATGAACT | 156083 | 156102 | -31.3 | 21 |
| 7 | ACTGGGACTAGGTAAAAGGT | 155902 | 155921 | -25 | 22 |
| 8 | GTCTCTTAGACCAGATAAGC | 155568 | 155587 | -25.3 | 23 |
| 9 | CTTACAAGAGTTTGGTTCCA | 155460 | 155479 | -26.7 | 24 |
| 10 | TACACTTTTGGAAGGGAGGG | 155363 | 155382 | -27.7 | 25 |
| 11 | CTATGGGTTCATGAGGGTTG | 155258 | 155277 | -29.1 | 26 |
| 12 | AAGGTTGGCTTTACTTATAT | 155030 | 155049 | -25.7 | 27 |
| 13 | GGGTGGATAACATAACACAT | 154856 | 154875 | -28 | 28 |
| 14 | CGTACACTTTGGCTTTTTCA | 154563 | 154582 | -24.9 | 29 |
| 15 | GCATGTTGTGTCTGCTTCCT | 154364 | 154383 | -32.1 | 30 |
| 16 | GTGCAACATATGGAGAGTGA | 154283 | 154302 | -32 | 31 |
| 17 | TCTGTACTGAGGACATGAAC | 154182 | 154201 | -27.8 | 32 |
| 18 | GGGAGGTTGAGGCTGAAGTC | 153735 | 153754 | -33.5 | 33 |
| 19 | GTACCAACAGCAGGGCAACA | 153709 | 153728 | -32.3 | 34 |
| 20 | AGATAGTAGCCTAGCAAAGA | 153457 | 153476 | -31.6 | 35 |
| 21 | GGTTTATAGTAGCAAAAAAC | 153249 | 153268 | -27 | 36 |
| 22 | GGCAAGTTGTACAAGGACAC | 153129 | 153148 | -31.8 | 37 |
| 23 | CTGGACCAACAGTGTGGTAC | 152796 | 152815 | -29.9 | 38 |
| 24 | GTGGTTTGACATACAGTAGG | 152589 | 152608 | -28.3 | 39 |
| 25 | GAAATAGGGCTATATTATGC | 152413 | 152432 | -30.3 | 40 |
| 26 | GTGGAAGGCAGGGCAGATAC | 152224 | 152243 | -34.7 | 41 |
| 27 | GATAACAGCCTCCAGCTTCT | 152016 | 152035 | -31.4 | 42 |
| 28 | CTCAGGTATTCAGACAGCAT | 151847 | 151866 | -33.4 | 43 |
| 29 | GAGGAACCAAGAACCAGGTC | 151765 | 151784 | -26.8 | 44 |
| 30 | CATGCGCACCACACCCGGCT | 151364 | 151383 | -31.5 | 45 |
| 31 | AACATTCTGGGAGGTGGAGG | 150902 | 150921 | -35 | 46 |
| 32 | GATGCTAAACATGTTTGAGG | 150582 | 150601 | -23.7 | 47 |
| 33 | GCTAAACATTAAATTCATAC | 150542 | 150561 | -24.7 | 48 |
| 34 | TTCTCTTCTTACCCGCAGCC | 150171 | 150190 | -35 | 49 |
| 35 | GCCTATTTGTGGTACCTCAT | 150112 | 150131 | -26.9 | 50 |
| 36 | GGGTTCCAAGGTCACCACAT | 149698 | 149717 | -29 | 51 |
| 37 | TCCTGTTGAGTTGTAGGAGT | 149469 | 149488 | -27 | 52 |
| 38 | AGTTCATTTCTGTACGTGGC | 149179 | 149198 | -33.1 | 53 |
| 39 | TTGGTCTATATACCTGTCCT | 149012 | 149031 | -28.5 | 54 |
| 40 | TTTGAGTAGTAATGATATCC | 148780 | 148799 | -29.7 | 55 |
| 41 | GGTGCTATTGTAAGTGGAAT | 148611 | 148630 | -28.5 | 56 |
| 42 | TCTGTGGGATCTTTATGTTT | 148469 | 148488 | -31.2 | 57 |
| 43 | GGGAAAGTGGGTCTTATTGT | 148315 | 148334 | -32.2 | 58 |
| 44 | GCTGGGAGATGTTGCATGAC | 148031 | 148050 | -33.8 | 59 |
| 45 | GGCTGGGGCAGGAGGAACAC | 147830 | 147849 | -35 | 60 |
| 46 | CCTCCCAAAGATCCTATCTC | 147352 | 147371 | -32.8 | 61 |
| 47 | GCTACTGGCCACTTGAACAG | 147066 | 147085 | -34 | 62 |
| 48 | CAGACAGCTTCTGCTATTGG | 147020 | 147039 | -30 | 63 |
| 49 | GTCTACTATGTGCCAGGCAA | 146686 | 146705 | -28.6 | 64 |
| 50 | AGGTTCAAGCCATTCCCCTG | 146534 | 146553 | -28.2 | 65 |
| 51 | TATAATGCAGGCACTTTGGG | 145703 | 145722 | -33.7 | 66 |
| 52 | ATAATGCAGGCACTTTGGGA | 145702 | 145721 | -34.4 | 67 |
| 53 | TACTACTGGCCAAATGGAAT | 144690 | 144709 | -32.6 | 68 |
| 54 | TTAATGTTACTACAATTAGG | 144600 | 144619 | -24.4 | 69 |
| 55 | CGCAGTGAAAGGGACATAGG | 144307 | 144326 | -35 | 70 |
| 56 | AAGAAGAGAATGGCAAAGGA | 144150 | 144169 | -28.5 | 71 |
| 57 | TACAGGTCCACTTAGATGCC | 143916 | 143935 | -31.4 | 72 |
| 58 | GGATGCATGCCACAGTAGTG | 143760 | 143779 | -32 | 73 |
| 59 | CTACTGGGGAGGCAGAGGCG | 143723 | 143742 | -28.6 | 74 |
| 60 | GCAGTTCCGCTCTCCAATAA | 143331 | 143350 | -30.2 | 75 |
| 61 | GGTGTTTAAAGGTTCTCATG | 142876 | 142895 | -30.1 | 76 |
| 62 | GGACCATAGATTAAGTAGCT | 142709 | 142728 | -29.5 | 77 |
| 63 | ATGTGGGTACAGGGTTGCTG | 142527 | 142546 | -35 | 78 |
| 64 | AAGGAACAGGAGCAAGCACC | 142191 | 142210 | -32.9 | 79 |
| 65 | CCATGCCTGGCTCATTTGTG | 141825 | 141844 | -32.1 | 80 |
| 66 | GTACCTTGCCAGTAAGTGAC | 141650 | 141669 | -34.5 | 81 |
| 67 | TGATTGTCAGTGCTATGGAA | 141466 | 141485 | -32 | 82 |
| 68 | ACAGACACCATACCAGAGGA | 140892 | 140911 | -32.6 | 83 |
| 69 | CCTGGGGTATGGGGCCAAGC | 140600 | 140619 | -33.3 | 84 |
| 70 | GGGGTGGCTTTCAGGGGGGC | 140261 | 140280 | -35 | 85 |
| 71 | GCGATGGACGATGGAGAGGC | 139924 | 139943 | -29.3 | 86 |
| 72 | CCATGCTCAGGAAGGAAGGC | 139672 | 139691 | -35 | 87 |
| 73 | GCTCAGGAAGGAAGGCTGGA | 139668 | 139687 | -32.8 | 88 |
| 74 | GTAGCTGTGCTCGGTGAGGA | 139458 | 139477 | -33.5 | 89 |
| 75 | GGATTCAGGGGGACCTCAGT | 139200 | 139219 | -33.2 | 90 |
| 76 | AGACGGCCCGGGGGCATCGT | 138956 | 138975 | -29.3 | 91 |
| 77 | GGCAGGTGTGGATGGGCGGC | 138855 | 138874 | -35 | 92 |
| 78 | CCAACAAATCAGCCGTAAGC | 138455 | 138474 | -30.7 | 93 |
| 79 | CTCTAAACTGGTCTGGTGGG | 138027 | 138046 | -35 | 94 |
| 80 | TGCTCAGGGATCTTGCTTTG | 137811 | 137830 | -34.6 | 95 |
| 81 | GTACATCTAGAGGGGATCTC | 137726 | 137745 | -30.1 | 96 |
| 82 | GCTGAGCAAAGTGACTAGTG | 137467 | 137486 | -34.1 | 97 |
| 83 | TAATTTGATGGTCTCTCGCC | 137403 | 137422 | -30.6 | 98 |
| 84 | TGAGGCTGTAGTGATTCTGG | 137089 | 137108 | -35 | 99 |
| 85 | TCCGAAAGGGCTGGGAGTCT | 136885 | 136904 | -35 | 100 |
| 86 | GGTGGGTGGCTTGGGTTCAA | 136412 | 136431 | -30.8 | 101 |
| 87 | TCCCTTCCATGCACAGCTTC | 136323 | 136342 | -31 | 102 |
| 88 | GGCTGGCCTGGGGATATTCT | 135947 | 135966 | -32.1 | 103 |
| 89 | GAAAGCTCCAGCCTTCCCTT | 135676 | 135695 | -27.8 | 104 |
| 90 | GCTGGATGCTTTAAGGTGAT | 135373 | 135392 | -28.4 | 105 |
| 91 | GCTGGGAAAAGTCATGGGTT | 135251 | 135270 | -31.5 | 106 |
| 92 | GAATGTGGTTTTGATGGGAG | 135092 | 135111 | -31.6 | 107 |
| 93 | GATGGGAGGCTATAAGAAGG | 135080 | 135099 | -35 | 108 |
| 94 | GTAGAGGGTTTGTGAAGGGT | 134947 | 134966 | -35 | 109 |
| 95 | GAACAAGATTTTTGGGAGGC | 134602 | 134621 | -32.2 | 110 |
| 96 | TGGGCAAGCTGAGATGGGAG | 134455 | 134474 | -33.8 | 111 |
| 97 | CACACTATGTTAGTATGGGG | 134248 | 134267 | -28.5 | 112 |
| 98 | TAATCATAACAAGAAGATGC | 133903 | 133922 | -24 | 113 |
| 99 | CCTAGAGTAAGTATTCTGTC | 133791 | 133810 | -25.7 | 114 |
| 100 | ATGCCTGGAGGAAGTTTCTG | 133709 | 133728 | -31.8 | 115 |
| 101 | GGCTTTCTTCACATTTCAAC | 133648 | 133667 | -27.7 | 116 |
| 102 | GCCTGGAGTGCAATGGTGAA | 133348 | 133367 | -33.5 | 117 |
| 103 | GAGAAGGAAAGACTAGAAAC | 132633 | 132652 | -29.9 | 118 |
| 104 | CTCTGAGCCATATCTGAAAC | 132366 | 132385 | -27 | 119 |
| 105 | TCAGCAGGAGACAGCAATGT | 132176 | 132195 | -30.7 | 120 |
| 106 | GGCCTTATTTTCTCTGTTGC | 131788 | 131807 | -29 | 121 |
| 107 | CCCTTGGAGTACTGGCACTA | 131720 | 131739 | -29.5 | 122 |
| 108 | TTAGGTAACTTTCTACAGAC | 131528 | 131547 | -26.5 | 123 |
| 109 | TGGTTGTCTTGCTCTGTTGC | 131372 | 131391 | -33.5 | 124 |
| 110 | GAAAATCAGCACGGACATAA | 130927 | 130946 | -29.6 | 125 |
| 111 | GAGGTGAACAAAGTAGGTTC | 130783 | 130802 | -30.2 | 126 |
| 112 | GGTTTGGGGGCTGAAAAGTC | 130250 | 130269 | -28.2 | 127 |
| 113 | GCAGGACAATTTGGCCCACT | 130129 | 130148 | -26.6 | 128 |
| 114 | GGATGCAGATGGTTTCACTA | 129745 | 129764 | -31 | 129 |
| 115 | CCTGATATCAGAGCTAGACA | 129639 | 129658 | -26.3 | 130 |
| 116 | ACTCATTCATGATTAAGGGA | 129350 | 129369 | -25.5 | 131 |
| 117 | GGCAACGATGTCCATGGTCA | 129133 | 129152 | -27.3 | 132 |
| 118 | GGGGCAGCGGGGACAAAAGG | 129044 | 129063 | -35 | 133 |
| 119 | CCCCACTTCTATATGTAAGC | 128871 | 128890 | -29.5 | 134 |
| 120 | GATACAAAGATACGGGCACT | 128673 | 128692 | -30.4 | 135 |
| 121 | GGAACCTCTCATCACTCCCA | 128481 | 128500 | -30.4 | 136 |
| 122 | GGCAATGTTGGGCTGAACAG | 128393 | 128412 | -32.2 | 137 |
| 123 | TCAAGAGTAAAATCATCGTT | 128163 | 128182 | -25 | 138 |
| 124 | TTTCCTCTTAGTCTTGGCCA | 127855 | 127874 | -31.1 | 139 |
| 125 | TGAAAACAAGAGAGCTATCC | 127598 | 127617 | -27.2 | 140 |
| 126 | ACCTGTATCTTCACTTTCAC | 127394 | 127413 | -27.3 | 141 |
| 127 | TCTTGGAATGTCCCATTCAG | 127343 | 127362 | -27.9 | 142 |
| 128 | GCTCATGCTTTCTGGGTCTG | 127037 | 127056 | -31.1 | 143 |
| 129 | GATCAATAGCCCCTCTTTCT | 126915 | 126934 | -31.2 | 144 |
| 130 | CACTCTGCCATGTTTCCTCT | 126663 | 126682 | -29.4 | 145 |
| 131 | GCCTGACTCTGACAATGCAC | 126632 | 126651 | -27.8 | 146 |
| 132 | GTGACAAGGACATACTCTGA | 126298 | 126317 | -32.4 | 147 |
| 133 | ACGGGAGAGCCAATAGCGCC | 126088 | 126107 | -35 | 148 |
| 134 | CACTGTAATCCTGGCTGGAG | 125902 | 125921 | -28.1 | 149 |
| 135 | GGGTTTTCTGGTTTCCTCTT | 125539 | 125558 | -29.9 | 150 |
| 136 | GGAGAGGAAAGGAGTAGTGG | 125317 | 125336 | -35 | 151 |
| 137 | CCTCTAGCCAGCACCCCACC | 124868 | 124887 | -35 | 152 |
| 138 | TGGGGAGGTGGAAGCAGGCT | 124511 | 124530 | -35 | 153 |
| 139 | TCTCTTCTGGCTAACACACT | 124077 | 124096 | -31 | 154 |
| 140 | GATGTCCTGTCCCTTTCCTC | 123802 | 123821 | -35 | 155 |
| 141 | GAAAGTAGGCCAGTGGCTGC | 123308 | 123327 | -28.4 | 156 |
| 142 | GGGATGGTGGAAGAGGAACA | 123285 | 123304 | -35 | 157 |
| 143 | GTTACGCGCCTGTAGTCCCA | 122357 | 122376 | -30.2 | 158 |
| 144 | GCACCCTGGTACAATCCCTC | 121800 | 121819 | -35 | 159 |
| 145 | GGCAGACATGAAAGGACAAG | 121426 | 121445 | -29.5 | 160 |
| 146 | AGAATGCAGGAGGTAAAAGC | 121389 | 121408 | -28 | 161 |
| 147 | GGAGAAGAGAGAGGAAAGGA | 120988 | 121007 | -35 | 162 |
| 148 | AGAGAGGAAAGGATGAGTAT | 120981 | 121000 | -33.1 | 163 |
| 149 | CAGCAGGTCCTTACATTTCC | 120774 | 120793 | -26.6 | 164 |
| 150 | CCATCACGCCTGGCCATCCT | 120287 | 120306 | -32.4 | 165 |
| 151 | TCACAAAAAAATGGGCAGCC | 120216 | 120235 | -31.9 | 166 |
| 152 | TTTCTGGAGTCCCCGACATC | 119886 | 119905 | -32.1 | 167 |
| 153 | GCCAGCTTGGTCCTTACATC | 119729 | 119748 | -30.8 | 168 |
| 154 | GCTCTCCCCACCAGTGACTG | 119602 | 119621 | -33 | 169 |
| 155 | AGCCCATTCCAGCTCCACAT | 119498 | 119517 | -28.5 | 170 |
| 156 | CTTAAGGACAGCGAGAACAG | 119320 | 119339 | -30.7 | 171 |
| 157 | GCTAGTCCTGTGACTTGTAC | 119170 | 119189 | -28.6 | 172 |
| 158 | GGAAACCTGCACTGTCTGAA | 118937 | 118956 | -34.8 | 173 |
| 159 | GTGGCTGACGGCTGAGATTT | 118820 | 118839 | -31.9 | 174 |
| 160 | GTAACACCTAGGAGCCAAAA | 118725 | 118744 | -28.5 | 175 |
| 161 | CAGGTGTCCAGATACGATGG | 118476 | 118495 | -27.5 | 176 |
| 162 | GAAGAACCAGCTGGGTGTGG | 118351 | 118370 | -30.2 | 177 |
| 163 | GGTCATAGTATCACAGAGGG | 118083 | 118102 | -35 | 178 |
| 164 | GCAGTTGAATGGCCCCGAGG | 117860 | 117879 | -34.3 | 179 |
| 165 | CATGGGATTGTGGGGGGCGG | 117754 | 117773 | -35 | 180 |
| 166 | GAGAAAGCCTCCAAGCAGAG | 117538 | 117557 | -29 | 181 |
| 167 | GACTCCAGAGGAAAACAGAA | 117473 | 117492 | -32.4 | 182 |
| 168 | GGATTCCAGAGAGAAAACAG | 117202 | 117221 | -31.8 | 183 |
| 169 | TACCAGAGCCGAAGAACATG | 117154 | 117173 | -32.5 | 184 |
| 170 | GTGTCTGGGAAGAATGGGGT | 116961 | 116980 | -35 | 185 |
| 171 | GTCATTGCACAGAGCCAGAT | 116759 | 116778 | -31.1 | 186 |
| 172 | GGCCTCAGAGTGTTATCAAG | 116653 | 116672 | -31 | 187 |
| 173 | CATGGCAAAATCCCGTCTAC | 116448 | 116467 | -32.8 | 188 |
| 174 | GCCCGGACAATGAAAGACTC | 116109 | 116128 | -29.6 | 189 |
| 175 | TCCTTCCTCTTCTCAACTGC | 115929 | 115948 | -31.3 | 190 |
| 176 | TGATCCGAGGTTGGCTGATT | 115276 | 115295 | -35 | 191 |
| 177 | TGTGCCTCTCTGTTTAAGGA | 115065 | 115084 | -33 | 192 |
| 178 | GGAAGCCATTTTTAACAGCA | 114886 | 114905 | -28.5 | 193 |
| 179 | TAGGAACATATGCGTCAGGC | 114739 | 114758 | -31.2 | 194 |
| 180 | GGGGTTACAAATAAATGTTA | 114653 | 114672 | -29.2 | 195 |
| 181 | GCATGCTGTAAATTCCAGGC | 114412 | 114431 | -28.5 | 196 |
| 182 | TGGTGACTTCAGCTGGATCT | 114230 | 114249 | -34.2 | 197 |
| 183 | TTCCTCAGAGCCCAAGCAGA | 114197 | 114216 | -28.9 | 198 |
| 184 | GTCTGGATTTCGATAAAACG | 113942 | 113961 | -27.7 | 199 |
| 185 | CCAGTGAGCTATCCTCTGCC | 113720 | 113739 | -28.8 | 200 |
| 186 | GAGCCACTGCACCTCGCTCC | 113246 | 113265 | -31.7 | 201 |
| 187 | GCTGACTCTGACATCCCTGC | 112755 | 112774 | -34 | 202 |
| 188 | CCTGCCAAGCTTCAGCCTCC | 112531 | 112550 | -31.4 | 203 |
| 189 | ATGGGGTACAATGTGTAATA | 112388 | 112407 | -29.2 | 204 |
| 190 | GCAATCCTCTCACCGTGGCC | 112181 | 112200 | -33.5 | 205 |
| 191 | GACAGCAGTATCTGAATGGT | 111998 | 112017 | -29.8 | 206 |
| 192 | AATGATCCACCTACCTTGGC | 111641 | 111660 | -31 | 207 |
| 193 | CCAAACTGCGGACAGAGGGA | 111375 | 111394 | -31.8 | 208 |
| 194 | GACAAAAACTCCTAGGGACC | 111198 | 111217 | -32.7 | 209 |
| 195 | CCTTCCTCGCTGGCCTCTGG | 110974 | 110993 | -34.2 | 210 |
| 196 | CCATATCAACATAGCTCCAG | 110810 | 110829 | -27.2 | 211 |
| 197 | GGGAAAGTGAGGCTTCTGGC | 110669 | 110688 | -34.4 | 212 |
| 198 | TAATGCAACAGCGAGATGGA | 110336 | 110355 | -28.9 | 213 |
| 199 | GGAGCAGGAATGAAGAATGC | 110263 | 110282 | -32.4 | 214 |
| 200 | ACCATAGACGCAGGAGGCTC | 110013 | 110032 | -34.8 | 215 |
| 201 | CAACCTTACCTATAGAAGAG | 109885 | 109904 | -27.9 | 216 |
| 202 | GAGACTGGAGAAAAATGGTT | 109818 | 109837 | -28.1 | 217 |
| 203 | TAAGGGATGTGATGTGAGGG | 109461 | 109480 | -35 | 218 |
| 204 | GAAGTATGTGCACTCCCTGT | 109419 | 109438 | -29.7 | 219 |
| 205 | GAGGAGAGAAAAATGGAAGC | 109297 | 109316 | -35 | 220 |
| 206 | GGTATAGAAGCCGGGTGCAG | 109051 | 109070 | -33.4 | 221 |
| 207 | ATAGAAGCCGGGTGCAGTGG | 109048 | 109067 | -35 | 222 |
| 208 | AGCAGAGGTCAGAACAGTGA | 108250 | 108269 | -30.2 | 223 |
| 209 | AGGCGGAAAATTAGTAAGGA | 108030 | 108049 | -27.8 | 224 |
| 210 | CCATGCTGACAGGGAACATT | 107919 | 107938 | -25.9 | 225 |
| 211 | GGTCAAAGAAGACATCTTGA | 107729 | 107748 | -24.5 | 226 |
| 212 | TAGTAAAATCTAGAGCAGAA | 107507 | 107526 | -27.3 | 227 |
| 213 | AGAAACAAAAGAGGGGTATC | 107355 | 107374 | -30.3 | 228 |
| 214 | TTATCTACTCCTGGCAAACA | 107159 | 107178 | -29.5 | 229 |
| 215 | GGGAGCAAGGTCAAGATGTG | 107036 | 107055 | -31.3 | 230 |
| 216 | CTCCCCCTGACCCCCCCAAA | 106675 | 106694 | -29.5 | 231 |
| 217 | GAGAATCTCAGCAAGTTATT | 106470 | 106489 | -25.9 | 232 |
| 218 | GATAGCATGGGGATTGGGAG | 106305 | 106324 | -35 | 233 |
| 219 | TACTGGAATATTGCTAAGAG | 105889 | 105908 | -29.3 | 234 |
| 220 | GAACAGAACAGGGAGCCCCC | 105588 | 105607 | -34.8 | 235 |
| 221 | GGTGCTGCAACGACTGGACA | 105479 | 105498 | -29.8 | 236 |
| 222 | GGCTAAAATTGACAAACTGA | 104937 | 104956 | -25.5 | 237 |
| 223 | TAATTGCTGGTGGGAATGCA | 104872 | 104891 | -26.9 | 238 |
| 224 | TCAAGCATACAACATTCTGG | 104468 | 104487 | -24.4 | 239 |
| 225 | ACAGGGGATTTTTAGGGCGG | 104364 | 104383 | -33.7 | 240 |
| 226 | GGGAAAACTGTAGGTTGGGG | 103817 | 103836 | -35 | 241 |
| 227 | GTCCCCCACTCCCACTCTCA | 103552 | 103571 | -32.2 | 242 |
| 228 | TCACCAACTCCTAAAACCGA | 103379 | 103398 | -27.4 | 243 |
| 229 | GAGAGAGATACAGCCTATGC | 103287 | 103306 | -35 | 244 |
| 230 | GGCAGGCCTAAACCATTAAC | 103017 | 103036 | -29 | 245 |
| 231 | GAAGCCAAAGTAGACTGTAC | 102778 | 102797 | -23.2 | 246 |
| 232 | AAGTTGCTCTAAATTCCCTC | 102742 | 102761 | -31.9 | 247 |
| 233 | GAGTGAAGATGCCAGTAAAC | 102559 | 102578 | -29.2 | 248 |
| 234 | GTTAGCATGCTCCATATAAT | 102347 | 102366 | -25.3 | 249 |
| 235 | TATATATATGTATGGCATGC | 101944 | 101963 | -28.2 | 250 |
| 236 | ACTCCAAGATGTGATGGCCC | 101872 | 101891 | -29.3 | 251 |
| 237 | GCCTGGCCCAGATACATATT | 101565 | 101584 | -28 | 252 |
| 238 | GGGGAAGCACTGCTGTAGGT | 101331 | 101350 | -35 | 253 |
| 239 | TGCACTTGCCCAAGATCACC | 100832 | 100851 | -31.2 | 254 |
| 240 | CTAAAGGAGGAAAGATTGAG | 100714 | 100733 | -30.9 | 255 |
| 241 | GCAGTTGTTGGGGCTTCAGG | 100573 | 100592 | -30.6 | 256 |
| 242 | GCTAGAACAAGGGTCTTTCC | 100327 | 100346 | -28.4 | 257 |
| 243 | CTGGCATCAGCTGATCTCCG | 100014 | 100033 | -30 | 258 |
| 244 | TGGCATCAGCTGATCTCCGG | 100013 | 100032 | -29.1 | 259 |
| 245 | TCCCAAACAGAACAAGACAT | 99676 | 99695 | -24.5 | 260 |
| 246 | TCAGTAACAACAACTCATGG | 99647 | 99666 | -26.8 | 261 |
| 247 | GGGATCAGGATTAGGATATG | 98635 | 98654 | -31.3 | 262 |
| 248 | ACACCCAAAAGCTTCAGAGG | 98471 | 98490 | -26 | 263 |
| 249 | GAAAACTGGCCCTAGAAGAT | 98225 | 98244 | -25.5 | 264 |
| 250 | ACATTTTAGGTCGGGGTCCC | 98003 | 98022 | -32.5 | 265 |
| 251 | TGGGTCGAGCAAGCAAGTGA | 97936 | 97955 | -35 | 266 |
| 252 | TTAATGAGTTCTATAATGCC | 97628 | 97647 | -26.9 | 267 |
| 253 | CATCCTTAGTCACTAATGAG | 97334 | 97353 | -23.8 | 268 |
| 254 | CCTCTCGTCTCTTACTCCAG | 97264 | 97283 | -34.5 | 269 |
| 255 | GTACCTCTCACTATTCCTCT | 97074 | 97093 | -29.9 | 270 |
| 256 | GAGCTCAAGCACCCCTCCCA | 96712 | 96731 | -34.4 | 271 |
| 257 | GCCATGTTGCTCAATCTGAG | 96605 | 96624 | -26.6 | 272 |
| 258 | TCCAAATGAAACTTCTTCCC | 96366 | 96385 | -31 | 273 |
| 259 | CCTTCGCCTCTGCTGGTTCC | 96118 | 96137 | -34.4 | 274 |
| 260 | TTGCCTGTCCTCTCTTGCCA | 96044 | 96063 | -35 | 275 |
| 261 | GGTTTGCGTATTCATCATCT | 95724 | 95743 | -31.9 | 276 |
| 262 | TGTCCTTCTTCCTCCACTGA | 95607 | 95626 | -31.1 | 277 |
| 263 | GCACCTTGGCCTCGTAATGC | 95478 | 95497 | -33.5 | 278 |
| 264 | CCTGACTAGCCTATAAAAAT | 95328 | 95347 | -31.7 | 279 |
| 265 | TCAATCTATTTGCATCCACC | 95060 | 95079 | -31.8 | 280 |
| 266 | GCTTACCTGTTCTATTGCAC | 94923 | 94942 | -28.9 | 281 |
| 267 | GGCTATTCTTTCAGGTTCAT | 94557 | 94576 | -26.4 | 282 |
| 268 | TATAGATGAGTCTGGTACAA | 94414 | 94433 | -26.4 | 283 |
| 269 | GGAGTAAAAAGGCATCCCAC | 93997 | 94016 | -31.4 | 284 |
| 270 | GGGCGACTCAAAAGGGAAAG | 93533 | 93552 | -32.6 | 285 |
| 271 | GAAAATGGGGACTCGAACAG | 93219 | 93238 | -28.9 | 286 |
| 272 | AGAATGGTGGTTACAAGAGG | 92919 | 92938 | -35 | 287 |
| 273 | GAGTTTCAGCTGGGAAGAGG | 92859 | 92878 | -35 | 288 |
| 274 | GTGAGGAGTTTGGGGAAGGA | 92486 | 92505 | -34.5 | 289 |
| 275 | CTGAGAGATGCTGTTAAGTC | 92445 | 92464 | -27.3 | 290 |
| 276 | TATCCCTTTGGCCACTGGAT | 92160 | 92179 | -31.7 | 291 |
| 277 | GAGGTCATTTACAAGTATTC | 92009 | 92028 | -30.6 | 292 |
| 278 | GCTTGAGGTGTTAAGAGCTA | 91772 | 91791 | -33.3 | 293 |
| 279 | AGGAGATTTTCATCAGGCTT | 91728 | 91747 | -30.8 | 294 |
| 280 | CAAGATTGGGTATGTACAAC | 91333 | 91352 | -27.3 | 295 |
| 281 | TGGGTATGACTTCAGTGAAA | 91307 | 91326 | -30.6 | 296 |
| 282 | GCCAGGGAAGACTAAATATC | 91056 | 91075 | -28.6 | 297 |
| 283 | GGTCGGCAACCCTAGCTATC | 90907 | 90926 | -29.4 | 298 |
| 284 | GCTGCTCTCTGGGCCCCAAC | 90561 | 90580 | -33.4 | 299 |
| 285 | GTGTGGTGCTCTTTCGCTGA | 90407 | 90426 | -31.1 | 300 |
| 286 | GGTGCTCTTTCGCTGAAGCT | 90403 | 90422 | -31.1 | 301 |
| 287 | TACTACAGTTTCTAAGCAGT | 90074 | 90093 | -27.9 | 302 |
| 288 | GCCACTGTCTCTGTCCTCAT | 89768 | 89787 | -30.7 | 303 |
| 289 | GCTCTCTTCCAGGCATGTCC | 89745 | 89764 | -32.6 | 304 |
| 290 | GAAGGGCTAAATTGATACCA | 89108 | 89127 | -30.6 | 305 |
| 291 | TCTGAGAACAATGAAGAGTA | 89087 | 89106 | -27.5 | 306 |
| 292 | GGTACAAAAGCTACTCAGCC | 88770 | 88789 | -31 | 307 |
| 293 | AGACCTACATGGCAAAAACG | 88324 | 88343 | -30.3 | 308 |
| 294 | GCCACAATGCGTCAGGGAAA | 88272 | 88291 | -33.6 | 309 |
| 295 | TTGAAAAAGTACGATAATGT | 87998 | 88017 | -25.6 | 310 |
| 296 | GCAGCGAGGAGAAAACCACC | 87900 | 87919 | -28.4 | 311 |
| 297 | CACTGTGGAAGGAGGAACAC | 87742 | 87761 | -27.9 | 312 |
| 298 | GTTCAAGAGAAGTGGCTGCC | 87689 | 87708 | -34.5 | 313 |
| 299 | CCCTCCCCATGAGCCAGGAC | 87369 | 87388 | -35 | 314 |
| 300 | AGCTAGGACCCCAATCCCCC | 86767 | 86786 | -35 | 315 |
| 301 | CTTCTTCAAAAACCTCCTTC | 86744 | 86763 | -30.3 | 316 |
| 302 | CATGAAAGGGGGTATTAGTG | 86347 | 86366 | -29.6 | 317 |
| 303 | GCCACCAAAAGCCTTCCTGT | 86084 | 86103 | -30.4 | 318 |
| 304 | TTTCCCCCTCAGTCTTAGTC | 85961 | 85980 | -35 | 319 |
| 305 | CGCGCCCGGCCTCGTACCCC | 85647 | 85666 | -35 | 320 |
| 306 | ACAACTAACTGGTCAACTTC | 85490 | 85509 | -27.8 | 321 |
| 307 | CTGATTTCTTCTATTTCCCT | 85318 | 85337 | -28.3 | 322 |
| 308 | TCCTTTTGCCTCACCTCTTC | 85238 | 85257 | -32 | 323 |
| 309 | GGGCCTTTTCTCAATCCCAC | 85089 | 85108 | -28.2 | 324 |
| 310 | AGGACACATAGCTGATAGGC | 84890 | 84909 | -33.3 | 325 |
| 311 | CTCTCAGCCTTTCCCAGCAT | 84656 | 84675 | -30.8 | 326 |
| 312 | TGCACTGGTGCCCAACTACA | 84524 | 84543 | -33.3 | 327 |
| 313 | TTACCCCTACTCTGTGCTCC | 84413 | 84432 | -35 | 328 |
| 314 | TTCTTCCCCTAACCATCTGA | 84304 | 84323 | -35 | 329 |
| 315 | CACTATAAATCCATTGAGGC | 84124 | 84143 | -28.1 | 330 |
| 316 | ATGAATTCCTTTTGGCTGGG | 83792 | 83811 | -32.2 | 331 |
| 317 | TCCCTTGGCTACTACATAGC | 83058 | 83077 | -30.3 | 332 |
| 318 | AGTATCGCAATACAGCAGCA | 83023 | 83042 | -31 | 333 |
| 319 | TTTATGGTTATGGAAGACAG | 82801 | 82820 | -29 | 334 |
| 320 | GCCTCTTCCACTTACAGTAT | 82548 | 82567 | -30.2 | 335 |
| 321 | GACTATCTTGTAGCCTATGG | 82339 | 82358 | -25.3 | 336 |
| 322 | CTTGTAGCCTATGGAGGGTG | 82333 | 82352 | -31.6 | 337 |
| 323 | GCCTGGAGTGCCAGATCTAG | 82165 | 82184 | -28.4 | 338 |
| 324 | GGGAGAGGTGGAAGCTAGGA | 81444 | 81463 | -33.9 | 339 |
| 325 | GGTGGAAGCTAGGAGGAAGA | 81438 | 81457 | -34 | 340 |
| 326 | GTCAGCCGGGCGTGGTGGCC | 80940 | 80959 | -33.8 | 341 |
| 327 | GTCTGGAGTAGCTTCCTTGC | 80657 | 80676 | -30.4 | 342 |
| 328 | CTCTGGGGTCTTCCACTGCC | 80558 | 80577 | -34.6 | 343 |
| 329 | ATGTGCAATATCAGTATGGC | 80396 | 80415 | -29.4 | 344 |
| 330 | GCCCTAAGACGGAAATCCAT | 80246 | 80265 | -29 | 345 |
| 331 | GCTGTGGAGGGGAACTATGA | 79935 | 79954 | -33.2 | 346 |
| 332 | GAAAGAGAGAGACCAAAACT | 79906 | 79925 | -30.1 | 347 |
| 333 | CATGTTAAATGGAGTATGAC | 79782 | 79801 | -26.2 | 348 |
| 334 | TGGCATCAGAAGAGCACCGA | 79589 | 79608 | -28.8 | 349 |
| 335 | GTCAGACCAGTTCCCTTTAC | 79308 | 79327 | -27.7 | 350 |
| 336 | TACTCACGGGCATTTAAGTC | 79291 | 79310 | -28 | 351 |
| 337 | CCATAAATGGGGCAATTTAT | 79119 | 79138 | -27.3 | 352 |
| 338 | GGCTTACATGTATGACCTGA | 78623 | 78642 | -27.9 | 353 |
| 339 | CCAAAGCACAGGTAACAACA | 78525 | 78544 | -28.5 | 354 |
| 340 | TATGGAATGGGAAAAGATAA | 78422 | 78441 | -28.8 | 355 |
| 341 | GACAACAAGTGGTGAGGATG | 78154 | 78173 | -34.6 | 356 |
| 342 | TGGTAGTTACCAGGGGCTGG | 77667 | 77686 | -35 | 357 |
| 343 | GGTGAGGGGGAAATGGGGAG | 77647 | 77666 | -35 | 358 |
| 344 | TCACAGGAGTCAGACAATAG | 77114 | 77133 | -30.2 | 359 |
| 345 | CAGTGTTATGGTTGAAGTAG | 76887 | 76906 | -26.4 | 360 |
| 346 | GGTCTCTGAGGGTATCTGGA | 76720 | 76739 | -30 | 361 |
| 347 | CCAATACCATTCTTAACTGA | 76604 | 76623 | -27.8 | 362 |
| 348 | TAGGGTTAAGATAATCCACG | 76393 | 76412 | -28.3 | 363 |
| 349 | GCCAACTCGCCCAGCCCACA | 76014 | 76033 | -33.4 | 364 |
| 350 | GAGGCTTGGGTACTGAGAAC | 75882 | 75901 | -31.4 | 365 |
| 351 | GGTTCTCTTTGTCTGTTCTA | 75521 | 75540 | -28.2 | 366 |
| 352 | TCCTGGAAGCTAATAATCTG | 75349 | 75368 | -31.8 | 367 |
| 353 | TATCCCTCCCCCTAGCCCCC | 75135 | 75154 | -35 | 368 |
| 354 | GTCTGTTTGTATCCTTCACC | 74462 | 74481 | -29.1 | 369 |
| 355 | TTTGGCCTGAGACAATGGGG | 73391 | 73410 | -33.6 | 370 |
| 356 | GCTCCTCGTTGTACCTCTGG | 72707 | 72726 | -34.9 | 371 |
| 357 | GTGTGATGTGTTGCTGAGAA | 71891 | 71910 | -34.8 | 372 |
| 358 | GGGTCTTGACTCGTTATCCA | 71370 | 71389 | -32.8 | 373 |
| 359 | GCAGTGGCTGTTACCGTTTT | 71180 | 71199 | -29 | 374 |
| 360 | GGTCCCCCACTCTCTTCTGG | 70981 | 71000 | -35 | 375 |
| 361 | GGCTTGCGTATGCTTCATGA | 70502 | 70521 | -30.4 | 376 |
| 362 | GCAGGTCTGCTGGTGTTTGC | 70035 | 70054 | -32.5 | 377 |
| 363 | GCTGTGCTGAGAGATCCACT | 69773 | 69792 | -32.3 | 378 |
| 364 | GGGTCACCACAACATCCGCC | 69167 | 69186 | -32.3 | 379 |
| 365 | GATGGAATAGAAGAAGGCAG | 68819 | 68838 | -35 | 380 |
| 366 | ATAGAAGAAGGCAGGGGGAA | 68813 | 68832 | -33.5 | 381 |
| 367 | TTACATCAGATGACACTTGC | 68594 | 68613 | -26.9 | 382 |
| 368 | GAAATTATTCTGATAACCCA | 68340 | 68359 | -21 | 383 |
| 369 | ACAGTCCACTGGATGATGTT | 68148 | 68167 | -28.4 | 384 |
| 370 | GTCTCCTCCAGGTTTCAGTT | 68009 | 68028 | -31.6 | 385 |
| 371 | GGGGTTTGTATTTCTGGCCA | 67747 | 67766 | -32.3 | 386 |
| 372 | TTATGGGCAGGGCTTGGTGG | 67614 | 67633 | -35 | 387 |
| 373 | TTGGGAAGCTGAGGAGGTGG | 67571 | 67590 | -35 | 388 |
| 374 | AGAAATCAAAACTGAGACCA | 67219 | 67238 | -27.6 | 389 |
| 375 | TTCACTGCTCACAACTACCA | 66887 | 66906 | -28.6 | 390 |
| 376 | ACCAGTATGTCCATTCTTTC | 66806 | 66825 | -28 | 391 |
| 377 | CTTATTAGTCGTGCTAGCGG | 64759 | 64778 | -33.7 | 392 |
| 378 | CAAGGGCTGGAGAGGATGTG | 64172 | 64191 | -35 | 393 |
| 379 | GAGCCACTGCATTCAACCTC | 62925 | 62944 | -32.9 | 394 |
| 380 | CAGGCACTTCACTAGGTATT | 62852 | 62871 | -29.1 | 395 |
| 381 | GACAAAACCCAGTTGGCTTG | 62586 | 62605 | -30 | 396 |
| 382 | ACGCGTTCTAAGCCAGAGGG | 62510 | 62529 | -33.4 | 397 |
| 383 | GATGGGATATCAAGTAGGCA | 62100 | 62119 | -31.6 | 398 |
| 384 | GGGCTAGACATAAAGTACAG | 61908 | 61927 | -29.9 | 399 |
| 385 | GCCACTGTAGTTGCTGCTGT | 61751 | 61770 | -27.8 | 400 |
| 386 | AAGATGGGAGGGAGTAGAGA | 61706 | 61725 | -35 | 401 |
| 387 | CATTGTCATCCTTTAACCTC | 61375 | 61394 | -25.9 | 402 |
| 388 | TTCTGCAGACTGGGGCAGGG | 61042 | 61061 | -35 | 403 |
| 389 | GAGTTCTCACCATATTGCCC | 60894 | 60913 | -32.5 | 404 |
| 390 | TCAACGCTCAGCTCTTGTCC | 60722 | 60741 | -29.9 | 405 |
| 391 | TTTGGCCAGCGGGGAGAGGG | 60158 | 60177 | -32.2 | 406 |
| 392 | CTTAGGGTAGAGTGCAGTGG | 60125 | 60144 | -30.6 | 407 |
| 393 | CTGATCCTCTATTTTGTTCC | 59511 | 59530 | -29.9 | 408 |
| 394 | CAGACACTACCCCCACCCCA | 59002 | 59021 | -34 | 409 |
| 395 | CTGTACGATGCTTCGGAGTG | 58612 | 58631 | -29.4 | 410 |
| 396 | GGATCCATTTGGCTATGTTA | 58387 | 58406 | -31.1 | 411 |
| 397 | CACAGGAGGAGATAGGAGGT | 58207 | 58226 | -28.9 | 412 |
| 398 | AACCCACAATCAGCAGGCCT | 57935 | 57954 | -32 | 413 |
| 399 | AATTTTCTCCCAAAACCCAT | 57513 | 57532 | -25.8 | 414 |
| 400 | GCTTTGCATGGAAATACAAA | 57466 | 57485 | -28.1 | 415 |
| 401 | GGAAAACTGCCATGTGTCTT | 57280 | 57299 | -25.7 | 416 |
| 402 | GAGGGAGGACTGCGTGATCC | 57035 | 57054 | -32.2 | 417 |
| 403 | ATAGCAGGACAGATGGACGC | 56988 | 57007 | -31.9 | 418 |
| 404 | GGCCAGGCAAAGTGGCTCCC | 56800 | 56819 | -33.4 | 419 |
| 405 | TGTACAAATACAGCAAAGCT | 56329 | 56348 | -26.5 | 420 |
| 406 | GCACAATGTCCTTCTTTCCA | 56208 | 56227 | -30.3 | 421 |
| 407 | ACATGTAAGGCAATGTGCAG | 56034 | 56053 | -30 | 422 |
| 408 | ATGAGAATTCTGATGGAGGA | 55891 | 55910 | -30.5 | 423 |
| 409 | CTGGAAGTAGTCAACAATGT | 55747 | 55766 | -29.1 | 424 |
| 410 | GAGACACCGAGAGACAGAGA | 55599 | 55618 | -35 | 425 |
| 411 | GAGGGACGAAGAGGCCAGGG | 55466 | 55485 | -34.3 | 426 |
| 412 | GCAACCCAGAAGACAGCCCT | 55214 | 55233 | -31.6 | 427 |
| 413 | GGAATACATCGCAGGAGAGA | 55013 | 55032 | -35 | 428 |
| 414 | GAGTAAGGGAGAGGCATATG | 54848 | 54867 | -35 | 429 |
| 415 | CATTTCCTTCTCCCTCAGCC | 54549 | 54568 | -35 | 430 |
| 416 | GATCCATTAGAGTTACATTA | 54264 | 54283 | -26.9 | 431 |
| 417 | ATCTCGTGATTTTTGAAAGC | 54044 | 54063 | -28 | 432 |
| 418 | AGCAAAGGACTTACAAGACA | 53854 | 53873 | -28.9 | 433 |
| 419 | GGAGAGCAATCAAGTATAGT | 53809 | 53828 | -33.9 | 434 |
| 420 | GGCAAAAATGGACAGACCAC | 53253 | 53272 | -31.1 | 435 |
| 421 | GTGCAACGTTTGTCTAGGGG | 53155 | 53174 | -33.2 | 436 |
| 422 | GAGTAAGGTGGAGGGAAAAG | 53060 | 53079 | -35 | 437 |
| 423 | ATGGGGTGGGTGAGGCAGAG | 52870 | 52889 | -35 | 438 |
| 424 | CCTTGCTCTACTAGTCCTCA | 52550 | 52569 | -35 | 439 |
| 425 | GGCTGGTTGGATGTCTTCTT | 51925 | 51944 | -29.6 | 440 |
| 426 | AAGACCTACCTAGACATCCA | 51578 | 51597 | -29 | 441 |
| 427 | GAACTACCACGGGAGTCACT | 51379 | 51398 | -29.7 | 442 |
| 428 | GAGGTCAGATTCTAGGGGAC | 51286 | 51305 | -34.6 | 443 |
| 429 | GCAGAGAAAACAGACAACTG | 51250 | 51269 | -27.8 | 444 |
| 430 | CAGAATCTGAGGTGGAGGAG | 51122 | 51141 | -32.2 | 445 |
| 431 | GGTGAAGGCAAGTAAGGGAA | 50907 | 50926 | -35 | 446 |
| 432 | GCACATGTCTGTGGTGATGC | 50685 | 50704 | -33.3 | 447 |
| 433 | GCAGATCCTTCAGGAGGTAT | 50163 | 50182 | -32.8 | 448 |
| 434 | GTGGAGATGGAAGATAGTGG | 50061 | 50080 | -34.2 | 449 |
| 435 | GCTGTACAATGTTTGTGTCC | 49907 | 49926 | -27.3 | 450 |
| 436 | GATGCAGTCTCAGTCTATCG | 49569 | 49588 | -32 | 451 |
| 437 | GCCCGGCCTACTTTTTATCT | 49298 | 49317 | -31.4 | 452 |
| 438 | AGAGCCCCATCATTCACTGG | 49030 | 49049 | -31.2 | 453 |
| 439 | GGGAACGTAGTGATGGGACA | 48743 | 48762 | -31.6 | 454 |
| 440 | ACGCAAAGAAGGAGAGTGGG | 48676 | 48695 | -35 | 455 |
| 441 | GGAGGCTATAATCACAGGGC | 48635 | 48654 | -31.2 | 456 |
| 442 | TAGTGAGAGAATGGTTTGGG | 48415 | 48434 | -32.4 | 457 |
| 443 | GGGCTGGCCCAGATCTGCCT | 47887 | 47906 | -28.7 | 458 |
| 444 | CTCACTCTCCTGGCAAACTC | 47757 | 47776 | -29.8 | 459 |
| 445 | GCAGAGTTAGCTACTGAGTT | 47670 | 47689 | -29.2 | 460 |
| 446 | GCATACTACATGGGTGAACC | 47282 | 47301 | -33.5 | 461 |
| 447 | GGGGAGATGAAATGTTCTGG | 47137 | 47156 | -30.4 | 462 |
| 448 | AGAAGAGTAGATTTTATGGA | 47018 | 47037 | -28 | 463 |
| 449 | TTAGGTTAGGCAAAGAGTTC | 46545 | 46564 | -27.5 | 464 |
| 450 | GGCCACGGCCGGGCGCGGTG | 46202 | 46221 | -28.5 | 465 |
| 451 | TCAGCAATTCCTCTCACAGG | 45725 | 45744 | -30.4 | 466 |
| 452 | GACACAATGGGGCACCTACT | 45490 | 45509 | -31.3 | 467 |
| 453 | GATCAGGGATAGGGAGTGAG | 45408 | 45427 | -35 | 468 |
| 454 | GAGGTGTGCATAAGCAGGTC | 44640 | 44659 | -29.8 | 469 |
| 455 | TCAAGTGATGGGCAGGGGAG | 44427 | 44446 | -30.3 | 470 |
| 456 | CTATGAAGGCAGGCTGGAGC | 44314 | 44333 | -32.3 | 471 |
| 457 | GGACCTGAAGACTATATGGG | 44051 | 44070 | -33 | 472 |
| 458 | GGTCTGAGGAGAATGGCTGG | 43518 | 43537 | -35 | 473 |
| 459 | GCAGAGAAGCCAGGGAAGAT | 43347 | 43366 | -33.4 | 474 |
| 460 | GACAGACTACTAGAGAGGAA | 43320 | 43339 | -33.5 | 475 |
| 461 | TTCAGTGGAGGCAGTGGGGA | 42829 | 42848 | -34.4 | 476 |
| 462 | CAGTGAGGAATAGTGTGACC | 42732 | 42751 | -35 | 477 |
| 463 | TCAGGTAGAAGAAGTGAGGC | 42611 | 42630 | -33.6 | 478 |
| 464 | GACACAGTATCCCGGGCAAG | 42407 | 42426 | -31.2 | 479 |
| 465 | GCAGAATACACTTAATGAGG | 42370 | 42389 | -31.7 | 480 |
| 466 | AGCATATGTGAGGTGGGTGG | 42228 | 42247 | -35 | 481 |
| 467 | TTGGGGGCCCAGCTGAGTGG | 42102 | 42121 | -35 | 482 |
| 468 | GACTAGCTGAGGAAATGTGG | 41916 | 41935 | -32.2 | 483 |
| 469 | GGAGCTGATAGGAGAAAAGG | 41889 | 41908 | -33.3 | 484 |
| 470 | GGTAGAGAATAAGAGAAGGA | 41698 | 41717 | -33.6 | 485 |
| 471 | GTGGGCAACCATCTGGTACA | 41575 | 41594 | -31.7 | 486 |
| 472 | AGTTGGGTAGTGTGTGGCAA | 41420 | 41439 | -34.5 | 487 |
| 473 | AGTGGGGACACAAGGAAGGA | 41311 | 41330 | -35 | 488 |
| 474 | AAGCTCACTTCATAGAGGGG | 41218 | 41237 | -32.3 | 489 |
| 475 | AAGTTCTGATTCCCTTTACC | 40972 | 40991 | -28.6 | 490 |
| 476 | TCTTCTTTTCACCTGTAGCC | 40681 | 40700 | -27.8 | 491 |
| 477 | GAACCACAAGCTATTTTAAG | 40373 | 40392 | -28.2 | 492 |
| 478 | CCCAGATGTTATTTATAGTG | 40347 | 40366 | -30.2 | 493 |
| 479 | CTGGTTCTTGGTGGGGAGGG | 40116 | 40135 | -35 | 494 |
| 480 | GGCTAGCCTTATCTGGATCC | 39931 | 39950 | -29.2 | 495 |
| 481 | AGATGCTGGTGAGGCCGTGG | 39384 | 39403 | -35 | 496 |
| 482 | ACATGGAGGCGGCTGGAAGC | 39042 | 39061 | -33.4 | 497 |
| 483 | GAGGGAAAAAGCATGGGTGG | 38888 | 38907 | -35 | 498 |
| 484 | AGGCTCCTTGGGGGAATATA | 38702 | 38721 | -30.2 | 499 |
| 485 | AGAAGGGAAGGAGGGAAGGA | 38110 | 38129 | -34.1 | 500 |
| 486 | TGACAGCAAAGTATATGGTC | 37834 | 37853 | -25.2 | 501 |
| 487 | GGGCATACAAATTGGAAAGG | 37681 | 37700 | -32.3 | 502 |
| 488 | CACTACCCAAAGTAATCTGC | 37303 | 37322 | -30.9 | 503 |
| 489 | GCTGCCAAGAACATACATTT | 36999 | 37018 | -31.8 | 504 |
| 490 | AGAATGTATAAGGAGCTCGA | 36613 | 36632 | -32.2 | 505 |
| 491 | GTATGACCACTACGGAGAAC | 36323 | 36342 | -32 | 506 |
| 492 | GGCAGGGGGAGTGAGGATGG | 35953 | 35972 | -35 | 507 |
| 493 | GGTCCCTTCTCACATTGCTG | 35610 | 35629 | -29.6 | 508 |
| 494 | AGGCGAAGAAGGAGGCACCT | 35451 | 35470 | -35 | 509 |
| 495 | TGGATTAGGGGTGTCAGGCC | 34410 | 34429 | -31.5 | 510 |
| 496 | GAACCAGAACTACACATGCA | 34264 | 34283 | -27.2 | 511 |
| 497 | AACTCCTCACTCAGATATCA | 34181 | 34200 | -28.1 | 512 |
| 498 | GAGGTTGAGACAGGAGGACT | 33999 | 34018 | -35 | 513 |
| 499 | GGCAAACCCTGAGGATATGT | 33538 | 33557 | -26.5 | 514 |
| 500 | CTGATATTGGCTTCTGTTCC | 33326 | 33345 | -28.4 | 515 |
| 501 | GTTCTCCATCTCCCTTTTCA | 33098 | 33117 | -29.1 | 516 |
| 502 | CTTCTTCTCATGCTCTGCTG | 33048 | 33067 | -30 | 517 |
| 503 | AAAGGGTCTTGCTATGTGGC | 32753 | 32772 | -31.6 | 518 |
| 504 | TACAGATATATGAGAGGGGA | 32418 | 32437 | -29.8 | 519 |
| 505 | GGTGTAATTCTCAGTCTGAG | 32263 | 32282 | -30.4 | 520 |
| 506 | TATCACTGCAACTCTACTGC | 31899 | 31918 | -27.3 | 521 |
| 507 | GCAGGTAGGACCATCAGTGA | 31507 | 31526 | -31.4 | 522 |
| 508 | AATACCATAGGAAGAAGCTG | 31386 | 31405 | -29 | 523 |
| 509 | GCTAATCTCAGTTCCAAAGA | 31194 | 31213 | -23.8 | 524 |
| 510 | GGGATAGTCAGCTGCTTGGC | 30962 | 30981 | -29.8 | 525 |
| 511 | GGCCTATGTGGTTTAACTTT | 30655 | 30674 | -28.1 | 526 |
| 512 | GGCCACCATGGTGAAGCCCC | 30363 | 30382 | -31.3 | 527 |
| 513 | TCCAGCGTGGGCGAGAGAGC | 30216 | 30235 | -35 | 528 |
| 514 | CTGGATTATGATCAATACAC | 29985 | 30004 | -25.3 | 529 |
| 515 | AAGTATCTAAAATCTTGGCA | 29665 | 29684 | -24.1 | 530 |
| 516 | GCACAACTGTCAACCCAGGT | 29474 | 29493 | -28.3 | 531 |
| 517 | GGGACCGGGAGCCTTTAAGA | 29317 | 29336 | -32.7 | 532 |
| 518 | GTACATGACTACGAGAAAAT | 29135 | 29154 | -25 | 533 |
| 519 | GGTCTGGTCCAGAGTAAGAG | 29017 | 29036 | -31 | 534 |
| 520 | TAGCTGGTTCATGAAATAGA | 28634 | 28653 | -27.8 | 535 |
| 521 | GTCTTTCAGTGGGTTTGTAT | 28587 | 28606 | -29.8 | 536 |
| 522 | TCCTCACACCCAACATGCCA | 28417 | 28436 | -30.8 | 537 |
| 523 | CCTCAATTACTTGTCTATAA | 28292 | 28311 | -25.1 | 538 |
| 524 | CCCTCCCCACTCCCCACAAC | 27903 | 27922 | -35 | 539 |
| 525 | ACTCTTAAGGCAGAACATGA | 27622 | 27641 | -27.4 | 540 |
| 526 | AGCGTTCCTCTCCCTCTCCA | 27310 | 27329 | -35 | 541 |
| 527 | TCCATCCCTTCTAGTCTCCT | 27275 | 27294 | -35 | 542 |
| 528 | GTTCCATTCCACCTACGCAC | 27119 | 27138 | -30.5 | 543 |
| 529 | AGGGGCTCGATGTGGGGGAG | 26747 | 26766 | -35 | 544 |
| 530 | CCATGCCTACTCTTCCCTCC | 26401 | 26420 | -35 | 545 |
| 531 | CTTCTTCTCCTTCACATCCC | 26296 | 26315 | -35 | 546 |
| 532 | TCTTCCCACTCTGTCCCATT | 26142 | 26161 | -35 | 547 |
| 533 | ACCCTTCCTGATGCTATTCC | 25928 | 25947 | -31.6 | 548 |
| 534 | GCTCCTAGATCAGGGATTCT | 25620 | 25639 | -28 | 549 |
| 535 | TGCAATCTGCTGACCCACAC | 25595 | 25614 | -29.8 | 550 |
| 536 | GATCCACTGCTAGGTCTTGT | 25325 | 25344 | -25.7 | 551 |
| 537 | TTACCAGGTTGCTAGAGGGG | 25153 | 25172 | -34.3 | 552 |
| 538 | AAAAGAGGGAGCAGGGGGAG | 25032 | 25051 | -35 | 553 |
| 539 | TTGAAAGTCACACACCTATC | 24507 | 24526 | -31.6 | 554 |
| 540 | GTCACACACCTATCTTTCAT | 24501 | 24520 | -28.1 | 555 |
| 541 | CTCTAACTGCTATGGTATCT | 24080 | 24099 | -29.9 | 556 |
| 542 | GCTTCGGTATTAAGGTATAT | 23972 | 23991 | -26.9 | 557 |
| 543 | TAAATAAGATATGAGACAGC | 23791 | 23810 | -26.5 | 558 |
| 544 | GAATAATCTTTCCTCTGAGC | 23669 | 23688 | -26.3 | 559 |
| 545 | CCTTGCCCAGCCCTGTAGAG | 23166 | 23185 | -32.5 | 560 |
| 546 | CGTCACTGGTGTACTTCTGC | 22800 | 22819 | -34.6 | 561 |
| 547 | CAGCATCTGTCCACCGAAAG | 22580 | 22599 | -28.5 | 562 |
| 548 | TCCACTGGGCTTGCTTCCAC | 22343 | 22362 | -26.4 | 563 |
| 549 | GGGAGAGTAACTAGAAAGGC | 22215 | 22234 | -34.8 | 564 |
| 550 | TCTGGGAGGATGAGGTGGGA | 21995 | 22014 | -35 | 565 |
| 551 | AGCAGGGCACGGTGGTGCAC | 21889 | 21908 | -30.7 | 566 |
| 552 | GATGACCAGTGACAATGAAG | 21656 | 21675 | -30.2 | 567 |
| 553 | GAGAAGAAAATAGGTGCCCA | 21503 | 21522 | -30 | 568 |
| 554 | TATCATGACTGCAACAGACT | 21441 | 21460 | -26.4 | 569 |
| 555 | GCTAGTCCTCCAGGTGATTC | 21119 | 21138 | -35 | 570 |
| 556 | GGCAGGATCAGGTTGACACC | 20995 | 21014 | -33.4 | 571 |
| 557 | GACCCAAATCCAAAATATGG | 19806 | 19825 | -25 | 572 |
| 558 | ATGATAAGATGTGGCCGGGC | 19596 | 19615 | -33.8 | 573 |
| 559 | GATGTGGCCGGGCATGGTGG | 19589 | 19608 | -35 | 574 |
| 560 | TTAGGGATGGGTGCAGGGCT | 19067 | 19086 | -32.5 | 575 |
| 561 | AAGCAAGGGACACTGACACA | 18888 | 18907 | -28.8 | 576 |
| 562 | GCACTTTGCAGATACCACTT | 18541 | 18560 | -30.5 | 577 |
| 563 | GGCAACTCTGTGTTGGTTCC | 18467 | 18486 | -30.6 | 578 |
| 564 | CAGAAGTGCTACCCCAGTGA | 17973 | 17992 | -32.6 | 579 |
| 565 | ACAGCCCTTAAGAATGATGC | 17458 | 17477 | -28.4 | 580 |
| 566 | GCAGCCTACGGATCAAGGAG | 17201 | 17220 | -34.2 | 581 |
| 567 | CAGGCATCGTGGCAAACACC | 16972 | 16991 | -31.3 | 582 |
| 568 | GCTGAGACGGGGGGATCTCT | 16670 | 16689 | -34.2 | 583 |
| 569 | AGGGAGGGAGGCAAAGAGGG | 16369 | 16388 | -35 | 584 |
| 570 | GGCCTAGAATTGAACATGCA | 15860 | 15879 | -28.5 | 585 |
| 571 | GAATGAGCTCTTGGAAACTA | 15662 | 15681 | -27.9 | 586 |
| 572 | GGAGACTGTCCCTGGAGGAT | 15492 | 15511 | -27.3 | 587 |
| 573 | TAGCAGACTGCCAACCAAGC | 15157 | 15176 | -28.1 | 588 |
| 574 | CAGACTGGAGCCAGAGAGGG | 14868 | 14887 | -35 | 589 |
| 575 | GGAGGAAACAATATGAACTG | 14819 | 14838 | -27.7 | 590 |
| 576 | GCACTGAGCCATGACCACGC | 14221 | 14240 | -35 | 591 |
| 577 | GGGTTTGAGGCACGGTGGGA | 14062 | 14081 | -35 | 592 |
| 578 | AACAAGTAGGCCGGGCACAG | 13717 | 13736 | -35 | 593 |
| 579 | GGCTGAAGCAGGAAGATAGC | 13215 | 13234 | -28.9 | 594 |
| 580 | TCTGGAAAATGAGGCCACCC | 12971 | 12990 | -30.6 | 595 |
| 581 | CCTTCTTTGAGCTGGATACC | 12740 | 12759 | -30.6 | 596 |
| 582 | AGTATTCCAAGCAGTTTGCA | 12546 | 12565 | -29 | 597 |
| 583 | GGGGGATTAGAGTGCTATAG | 12428 | 12447 | -33.7 | 598 |
| 584 | TCTTGCCCACGTGATGCCTT | 12218 | 12237 | -35 | 599 |
| 585 | GGGAGACTGACCTCACTACT | 11919 | 11938 | -32.9 | 600 |
| 586 | GAGAATGAAGCCTGAGGACT | 11655 | 11674 | -32.6 | 601 |
| 587 | GCAGTACTGGGGCATGGATC | 11549 | 11568 | -31.2 | 602 |
| 588 | CTTAATTTCTCTGTGCCTGT | 11368 | 11387 | -28.5 | 603 |
| 589 | TAGAAGAACAGTGTGGGGCC | 11169 | 11188 | -31.9 | 604 |
| 590 | AAGAGAATGGTGGTCCCAGA | 10762 | 10781 | -32.2 | 605 |
| 591 | CAAGAGAGAGTAGATTAGGA | 10728 | 10747 | -31.5 | 606 |
| 592 | CCAAGGCCAGGTGCAGTAGC | 10599 | 10618 | -30.5 | 607 |
| 593 | TATTATCTGCGGCAATATGG | 9878 | 9897 | -24.7 | 608 |
| 594 | TTACAAGAGGCTGGGACGTG | 9739 | 9758 | -35 | 609 |
| 595 | ATCCTCCCTACCAAAAAACC | 9397 | 9416 | -34.2 | 610 |
| 596 | ACACATCCCTGGCTTTTCCC | 9225 | 9244 | -32 | 611 |
| 597 | CTCCGTCCTTTCCACTTCTC | 9137 | 9156 | -34.7 | 612 |
| 598 | GTGTTCTGACAGAAAATGGG | 8767 | 8786 | -35 | 613 |
| 599 | TACACAACCCCTTACGTGAA | 8431 | 8450 | -32.6 | 614 |
| 600 | CAGGGAGCAGTACAGCTTGG | 8144 | 8163 | -33.3 | 615 |
| 601 | GCCAGAAGAAAGCAAGAAGT | 8054 | 8073 | -32.5 | 616 |
| 602 | AGCAAGGAGTAACCAAATAG | 7801 | 7820 | -29.6 | 617 |
| 603 | GGGGCAACCAGGTAGGTAAC | 7596 | 7615 | -33.7 | 618 |
| 604 | TGATGAATAGGAAGTACACA | 7574 | 7593 | -30 | 619 |
| 605 | ACATTTAAGTGGGGGAGGGC | 7334 | 7353 | -35 | 620 |
| 606 | GGGGGAGGGCTGTTATAGAA | 7324 | 7343 | -33.5 | 621 |
| 607 | TCTGGGCCCAAACTAAGTGG | 7027 | 7046 | -32.5 | 622 |
| 608 | TTTGTCTGCTGTTCATGATG | 6852 | 6871 | -29.9 | 623 |
| 609 | TTGTCTGCTGTTCATGATGA | 6851 | 6870 | -31 | 624 |
| 610 | GACAAGACGCCACAGTGGAA | 6338 | 6357 | -32.9 | 625 |
| 611 | GGCTAGACTAGTGCAGTGGC | 5910 | 5929 | -35 | 626 |
| 612 | CCTCCCGCCATGGGCCTCCC | 5707 | 5726 | -29.7 | 627 |
| 613 | GTGAAGACAAGGGAAGGGGG | 5385 | 5404 | -34.5 | 628 |
| 614 | GCCTCTTAGGGACTGAGCTA | 5217 | 5236 | -31.3 | 629 |
| 615 | AGTCTACTCAAAAACCTGGG | 5067 | 5086 | -28.2 | 630 |
| 616 | AGGCCAAGGTGGGAGGATAC | 4891 | 4910 | -35 | 631 |
| 617 | GCACATGACTCTGCAACCCC | 4544 | 4563 | -29.4 | 632 |
| 618 | GCCCAGGAGGTTGACAGTGT | 4263 | 4282 | -33.1 | 633 |
| 619 | ACGGGTGAGGAGGAGTTAGG | 4125 | 4144 | -35 | 634 |
| 620 | TTTGGGTGATGGAAGTGTTC | 4081 | 4100 | -31.4 | 635 |
| 621 | GCTCTATCTCGTAAGATTGC | 3732 | 3751 | -22.9 | 636 |
| 622 | ACCTGTTTCCTATTGTCGCT | 3486 | 3505 | -30.2 | 637 |
| 623 | CAGGGGAAAAGACAGATACG | 3352 | 3371 | -29.5 | 638 |
| 624 | GAGACCTGCATTAGCAAGAG | 3284 | 3303 | -29 | 639 |
| 625 | GGGCTCTTTGCTATCCTACC | 3135 | 3154 | -29.1 | 640 |
| 626 | TAAGACTCCTTTTCAGTAAC | 2867 | 2886 | -29.8 | 641 |
| 627 | AACATTAAGGTCGCTCGGTC | 2741 | 2760 | -35 | 642 |
| 628 | CAACTGGTCACGGGGAGGAG | 2566 | 2585 | -35 | 643 |
| 629 | TCGCGCGTGGCTGGGGGCAG | 2418 | 2437 | -35 | 644 |
| 630 | AACCGACGGGAGGAGGGGGA | 2388 | 2407 | -35 | 645 |
| 631 | AGCGCCCTACCTGAACCCGC | 2162 | 2181 | -24.4 | 646 |
| 632 | GGGCGCGCCCAGCCCGGTCC | 2117 | 2136 | -26.4 | 647 |
| 633 | GATGCTCACCGATACTGATA | 54427 | 54446 | -24.2 | 648 |
| 634 | CTCCCTCGTCTTTCACAGTC | 54363 | 54382 | -26.4 | 649 |
| 635 | CTGGCTTGGATCAAACTCTG | 54322 | 54341 | -24 | 650 |
| 636 | GACATCAATGATCTTACCTG | 68095 | 68114 | -25.7 | 651 |
| 637 | GATGAAGTCACAGAACTATC | 68044 | 68063 | -22.1 | 652 |
| 638 | GGAAGAACTGTCTCCTCCAG | 68018 | 68037 | -25.2 | 653 |
| 639 | CCTCTCACCGAATCTGATGA | 79673 | 79692 | -25.9 | 654 |
| 640 | GAGCCAAACATCATCTCTCC | 79617 | 79636 | -25.3 | 655 |
| 641 | CAAACATCATCTCTCCAAGC | 79613 | 79632 | -27.6 | 656 |
| 642 | GCACTTACGTATTGAGACTC | 80004 | 80023 | -23.3 | 657 |
| 643 | TGCCAGTCCGAGCAGTAAAC | 79971 | 79990 | -26.8 | 658 |
| 644 | GCCAGTCCGAGCAGTAAACA | 79970 | 79989 | -28.3 | 659 |
| 645 | ATCAAAGGAACCATTTACCT | 82435 | 82454 | -23.4 | 660 |
| 646 | GTTATTATCAGCCTTTAATG | 82386 | 82405 | -24.6 | 661 |
| 647 | ATCTTGTAGCCTATGGAGGG | 82335 | 82354 | -31.3 | 662 |
| 648 | GATCAGGCGGAGCGGACCCT | 88382 | 88401 | -18.8 | 663 |
| 649 | ACCGTGCTATGCCACTGTCT | 89778 | 89797 | -24.4 | 664 |
| 650 | TACCATCTAGGAAATACCCC | 92574 | 92593 | -28.2 | 665 |
| 651 | GCGTCGCCAACGTCGCTGGT | 92530 | 92549 | -24.1 | 666 |
| 652 | CTGGTAGCTGCTGGCACAAC | 92515 | 92534 | -21.7 | 667 |
| 653 | TGGAGTGATCAGCAAGCTGC | 92464 | 92483 | -29 | 668 |
| 654 | GTTCATGTGGCTTTCAAAGA | 94893 | 94912 | -26.9 | 669 |
| 655 | GGTTAGGGCCACAGCTTTCA | 94765 | 94784 | -26.3 | 670 |
| 656 | AAAGCTGGGCAATATGTACC | 100084 | 100103 | -26 | 671 |
| 657 | TCTCTGACTGGCATCAGCTG | 100021 | 100040 | -27.3 | 672 |
| 658 | GAAACGATAGCAAAGGTGGT | 119909 | 119928 | -31.4 | 673 |
| 659 | ATCATTGTAAGCCAGACAGG | 119869 | 119888 | -29.9 | 674 |
| 660 | TCGTGGCATCGTGTAAAGAT | 119840 | 119859 | -27.6 | 675 |
| 661 | GTAAAGATTACAAATTGTTG | 119828 | 119847 | -24.5 | 676 |
| 662 | AGTGGGTTATATGGATGAGT | 121265 | 121284 | -24.8 | 677 |
| 663 | CCACACTCTGAGAGGAATGC | 121231 | 121250 | -26.3 | 678 |
| 664 | CTGAGAGGAATGCTTTTCTA | 121224 | 121243 | -25.8 | 679 |
| 665 | GAAAACTTCCTACTTACCCA | 127494 | 127513 | -20.4 | 680 |
| 666 | CAATCTTCTTGCTCTCCTCC | 127447 | 127466 | -25.4 | 681 |
| 667 | CCTCCATAATAACTGCTAAC | 127432 | 127451 | -26.8 | 682 |
| 668 | TCATATCATGACCTGTATCT | 127404 | 127423 | -26.6 | 683 |
| 669 | CTATCCCCAAGGGCACTGTC | 127375 | 127394 | -27.3 | 684 |
| 670 | GTTATTTTTTGTACACAATA | 127172 | 127191 | -24.6 | 685 |
| 671 | TTTTGTACACAATATTTTTG | 127166 | 127185 | -21.6 | 686 |
| 672 | GGAACATCATCAATAGTCCT | 127096 | 127115 | -25.9 | 687 |
| 673 | CAATAGTCCTGGTTTCGATT | 127086 | 127105 | -25.7 | 688 |
| 674 | TTCGTCGAATAAGCTCATGC | 127049 | 127068 | -24 | 689 |
| 675 | CAGGGAAGTTCACAGGGCTC | 127006 | 127025 | -28.2 | 690 |
| 676 | GGCTCTTCAGAAACCATGTT | 126991 | 127010 | -24.4 | 691 |
| 677 | GGTCCTTGGTTGTTTGTTTA | 126948 | 126967 | -26.4 | 692 |
| 678 | GGTTTGGTGTGATGTCTGGT | 126886 | 126905 | -28.5 | 693 |
| 679 | GATCCACCACTGCCTGACTT | 126861 | 126880 | -29.1 | 694 |
| 680 | CTGCCTGACTTCGAAGCTCA | 126852 | 126871 | -25.3 | 695 |
| 681 | TCAGGTGACATAGAATCCCC | 126823 | 126842 | -26.1 | 696 |
| 682 | GGAAAGTAACCTTTGTCTGG | 126798 | 126817 | -22.3 | 697 |
| 683 | GTGGATCTCATTGCTTTGCC | 126712 | 126731 | -26.7 | 698 |
| 684 | CCAGCAACTTCTCACTCTGC | 126675 | 126694 | -22.4 | 699 |
| 685 | TTGTCTACTGGAACAGATCC | 126610 | 126629 | -23.2 | 700 |
| 686 | CTCTAACTTGGCGTCAAAGC | 126575 | 126594 | -21.2 | 701 |
| 687 | TCTCTGTACTGTTTAACATC | 126541 | 126560 | -23.5 | 702 |
| 688 | CTTGGCAGTCAGAAGGAGAA | 126507 | 126526 | -26 | 703 |
| 689 | CACTCATCTGAAATTCCTAG | 126478 | 126497 | -18.9 | 704 |
| 690 | ACAGTTACAATTGGGAGTTC | 126368 | 126387 | -22.8 | 705 |
| 691 | CTCTTTAAAGAGCAAACTGC | 126335 | 126354 | -24.3 | 706 |
| 692 | GCATTGTGACAAGGACATAC | 126303 | 126322 | -29.5 | 707 |
| 693 | TCACCTTTCTCTAAAGTGGT | 126268 | 126287 | -29.1 | 708 |
| 694 | AGTAATTACTGTGCCTGGCA | 126248 | 126267 | -29.6 | 709 |
| 695 | AGTCCTTGCTAACCGTACGG | 126104 | 126123 | -32.4 | 710 |
| 696 | GCGCCATACAAGTCTCCTGT | 126073 | 126092 | -30 | 711 |
| 697 | GGTCACTCACCTGCACAGCA | 128529 | 128548 | -29 | 712 |
| 698 | AGTCAGGCACATAAGATGAG | 128445 | 128464 | -27 | 713 |
| 699 | AGCCACCCAGCAAGGACCTC | 128421 | 128440 | -31.1 | 714 |
| 700 | GCTGAAGTGTGGAATGAAGC | 147151 | 147170 | -24.8 | 715 |
| 701 | GTGGAATGAAGCAGATTGGA | 147143 | 147162 | -26 | 716 |
| 702 | ACTCGTCTCTGGCTACTGGC | 147077 | 147096 | -30.9 | 717 |
| 703 | ACAGTCCATTTATCCATGTC | 147050 | 147069 | -29.6 | 718 |
| 704 | GACATGAACACGCATCTGCC | 151869 | 151888 | -27.1 | 719 |
| 705 | TCAGGTATTCAGACAGCATT | 151846 | 151865 | -32.8 | 720 |
| 706 | GCTCCTGCAACCGGTCTTCA | 151810 | 151829 | -27.1 | 721 |
| 707 | GCAACCGGTCTTCAAGATGC | 151804 | 151823 | -25 | 722 |
| 708 | CCCTAGAACTGGGAGGTTAT | 157234 | 157253 | -24.6 | 723 |
| 709 | GTATACAGAACAAGAAACAG | 157187 | 157206 | -24.9 | 724 |
| 710 | ACATATCCAACATCTAAGTA | 157161 | 157180 | -19.6 | 725 |
| 711 | GACATCTACCAGAAGTAGGC | 157113 | 157132 | -24.2 | 726 |
| 712 | TTTAAGTGATCATCCCCAGA | 157074 | 157093 | -30.4 | 727 |
| 713 | ATAAAAGCCAGAAATATTTA | 156969 | 156988 | -18.2 | 728 |
| 714 | TCTATAATGTAAAAGATCCC | 156904 | 156923 | -23.9 | 729 |
| 715 | GTAACAACTGTCTGTACCAT | 156843 | 156862 | -27.4 | 730 |
| 716 | CAACTGTCTGTACCATAACT | 156839 | 156858 | -25.9 | 731 |
| 717 | CTTTTCACATTCATCATAAT | 156789 | 156808 | -21 | 732 |
| 718 | CATTCCTTGGGCTTTGCGTA | 156743 | 156762 | -23 | 733 |
| 719 | AAGAATGACTATGGTGAAGG | 156719 | 156738 | -26.3 | 734 |
| 720 | GAATGACTATGGTGAAGGTA | 156717 | 156736 | -27.8 | 735 |
| 721 | GAAGGATTAGGAATTACAAA | 156685 | 156704 | -27.2 | 736 |
| 722 | GGGGAGGAACAAAACAGTAA | 156645 | 156664 | -22.8 | 737 |
| 723 | CCTTCCCAGCAAAGCTTAGC | 156574 | 156593 | -21.8 | 738 |
| 724 | GCTTTAGGAACAACAATAGC | 156556 | 156575 | -25 | 739 |
| 725 | AGGAACAACAATAGCATGAG | 156551 | 156570 | -25.6 | 740 |
| 726 | GGACTAGAATTTCTAAACGG | 156516 | 156535 | -24.4 | 741 |
| 727 | CTAAACGGTAATTAAACATT | 156504 | 156523 | -15.5 | 742 |
| 728 | GGTTAAGGAGACACCCAGAC | 156463 | 156482 | -25.7 | 743 |
| 729 | TTCCAAAATCAGACAACTGG | 156021 | 156040 | -22.2 | 744 |
| 730 | CAAAATCAGACAACTGGATA | 156018 | 156037 | -24.6 | 745 |
| 731 | AGGTAATAACTGGGACTAGG | 155910 | 155929 | -26.8 | 746 |
| 732 | GGGCCAAACAGATTGCAGAC | 155879 | 155898 | -24.2 | 747 |
| 733 | CAATTTCAGGTTTACATTCC | 155855 | 155874 | -24.6 | 748 |
| 734 | ACAGCAAGGCAAAATGTGAC | 155783 | 155802 | -24.4 | 749 |
| 735 | CAAGGTCAAAGACAACTTTC | 155748 | 155767 | -22.4 | 750 |
| 736 | AAACAGCAAGAATGGATGTG | 155709 | 155728 | -23.9 | 751 |
| 737 | GAATAAACAAGTGGTTTTCT | 155663 | 155682 | -18.3 | 752 |
| 738 | GTCAATGAAAGCAGAAACCA | 155609 | 155628 | -23.9 | 753 |
| 739 | ACCAACTTTACTACTAGCAT | 155593 | 155612 | -22.9 | 754 |
| 740 | GACCAGATAAGCAAAGAATA | 155560 | 155579 | -23.7 | 755 |
| 741 | GTAGTACTCAAGTAAACTGA | 155531 | 155550 | -23.8 | 756 |
| 742 | GAGGTAGTAGAAAGTATTGA | 155513 | 155532 | -26.6 | 757 |
| 743 | ATTTACATTACTTACAAGAG | 155470 | 155489 | -24.2 | 758 |
| 744 | TACAAGCAACACTCTATAGT | 155427 | 155446 | -23.5 | 759 |
| 745 | TAAGAGTTATGAATAGTGTA | 155317 | 155336 | -25.7 | 760 |
| 746 | AAGAGTTATGAATAGTGTAA | 155316 | 155335 | -25.2 | 761 |
| 747 | TGAGGATTATTAAGCAGTGA | 155294 | 155313 | -26.3 | 762 |
| 748 | GGGCCTTGGCTACCTGAGCA | 155225 | 155244 | -29.1 | 763 |
| 749 | GCCGATGCTTTGGTGCAATT | 155179 | 155198 | -22.1 | 764 |
| 750 | CATTTATGTTAAATTAGTGA | 155144 | 155163 | -23.3 | 765 |
| 751 | GAATATGTAAATATTAATAT | 155126 | 155145 | -15.9 | 766 |
| 752 | TTATAAGAACAGTTCATACT | 155106 | 155125 | -18.1 | 767 |
| 753 | AGTAGTATTCTCATTTTGGG | 155068 | 155087 | -24.2 | 768 |
| 754 | CTTAAAAAAAAGGTTGGCTT | 155039 | 155058 | -24.8 | 769 |
| 755 | TAAAGGCATGTTTACCAGTC | 154927 | 154946 | -22.9 | 770 |
| 756 | GGCATGTTTACCAGTCTTGT | 154923 | 154942 | -23.9 | 771 |
| 757 | GGATAACATAACACATTTAC | 154852 | 154871 | -24.6 | 772 |
| 758 | TCTTATAATTAACAGGCTGT | 154815 | 154834 | -24.8 | 773 |
| 759 | GGCTGTTTAAAATACTTACT | 154801 | 154820 | -25.3 | 774 |
| 760 | GAGAAATAACCAGACATTAG | 154779 | 154798 | -21.2 | 775 |
| 761 | ATAGATCTCTGTACCTTAGA | 154720 | 154739 | -22.1 | 776 |
| 762 | CTCTGTACCTTAGAAATTAA | 154714 | 154733 | -21.4 | 777 |
| 763 | GAGCTGTGACAACACTGCAG | 154630 | 154649 | -18.9 | 778 |
| 764 | GTTGCTTTAATTTCATTTGT | 154526 | 154545 | -22.3 | 779 |
| 765 | CACCACCCAAAAGTCCAGTC | 154494 | 154513 | -29.1 | 780 |
| 766 | GCAGAATACCCTGGTGACTG | 154430 | 154449 | -28.1 | 781 |
| 767 | TAAATGCATGTTGTGTCTGC | 154369 | 154388 | -26.9 | 782 |
| 768 | TTCTACCTATTTTCCCACCA | 154340 | 154359 | -21.9 | 783 |
| 769 | GGAGTATTTGTGCAACATAT | 154292 | 154311 | -27.5 | 784 |
| 770 | GAGTGCTTGCTACAGCAGCC | 154265 | 154284 | -30.7 | 785 |
| 771 | GTGGAAGATCACTGGATTCA | 154241 | 154260 | -25.4 | 786 |

TABLE 2
Example antisense oligonucleotide modulators to downregulate FNIP1

| | | Target start | Target stop | |
|---|---|---|---|---|
| | | site with | site with | |
| | | reference to | reference to | |
| | | SEQ ID | SEQ ID | SEQ ID |
| GI ID# | Sequence | NO: 11 | NO: 11 | NO |
| GiTx-45 | CTCAGGTATTCAGACAGCAT | 151847 | 151866 | 43 |
| GiTx-46 | ACGGGAGAGCCAATAGCGCC | 126088 | 126107 | 148 |
| GiTx-47 | GCTCTCTTCCAGGCATGTCC | 89745 | 89764 | 304 |
| GiTx-48 | GTCTCCTCCAGGTTTCAGTT | 68009 | 68028 | 385 |
| GiTx-49 | TGGCATCAGAAGAGCACCGA | 79589 | 79608 | 349 |
| GiTx-50 | TGGCATCAGCTGATCTCCGG | 100013 | 100032 | 259 |
| GiTx-51 | TTCTCTTCTTACCCGCAGCC | 150171 | 150190 | 49 |
| GiTx-52 | CGCAGTGAAAGGGACATAGG | 144307 | 144326 | 70 |
| GiTx-53 | GATGTCCTGTCCCTTTCCTC | 123802 | 123821 | 155 |
| GiTx-54 | TGATCCGAGGTTGGCTGATT | 115276 | 115295 | 191 |
| GiTx-55 | AGAATGGTGGTTACAAGAGG | 92919 | 92938 | 287 |
| GiTx-56 | CAGTGAGGAATAGTGTGACC | 42732 | 42751 | 477 |
| GiTx-57 | AACAAGTAGGCCGGGCACAG | 13717 | 13736 | 593 |

TABLE 3
Example antisense oligonucleotide modulators to upregulate FNIP1

| | | Target start | Target stop | |
|---|---|---|---|---|
| | | site with | site with | |
| | | reference to | reference to | |
| | | SEQ ID | SEQ ID | SEQ ID |
| GI ID# | Sequence | NO: 11 | NO: 11 | NO |
| GiTx-58 | CAGCTATGTACATATCCAAC | 157170 | 157189 | 16 |
| GiTx-59 | GGAAGCAGTGGGGAGGAACA | 156654 | 156673 | 19 |
| GiTx-60 | TTGATGGTTAAGGAGACACC | 156468 | 156487 | 20 |
| GiTx-61 | ACTGGGACTAGGTAAAAGGT | 155902 | 155921 | 22 |
| GiTx-62 | GTCTCTTAGACCAGATAAGC | 155568 | 155587 | 23 |
| GiTx-63 | CTATGGGTTCATGAGGGTTG | 155258 | 155277 | 26 |
| GiTx-64 | GGGTGGATAACATAACACAT | 154856 | 154875 | 28 |
| GiTx-65 | GCATGTTGTGTCTGCTTCCT | 154364 | 154383 | 30 |

TABLE 4
Example antisense oligonucleotide modulators targeting SEQ ID NO: 1

| | | Target start | Target stop | | |
|---|---|---|---|---|---|
| | | site with | site with | | |
| | | reference to | reference to | | |
| | | SEQ ID | SEQ ID | Binding | SEQ ID |
| No | ASO sequence | NO: 1 | NO: 1 | Score | NO |
| 1 | CCGCTGCGACTGAGTAACTC | 2066 | 2085 | -29.8 | 787 |
| 2 | GTCGGGGCCATGATGCCGCC | 2205 | 2224 | -25.5 | 788 |
| 3 | AGGGTCGGGGCCATGATGCC | 2208 | 2227 | -28 | 789 |
| 4 | CCCGCGCCAGAATTGCCCCC | 2335 | 2354 | -28.3 | 790 |
| 5 | CCGGCGAGCACCGAAGCCAA | 2362 | 2381 | -29.3 | 791 |
| 6 | GGACCAGGTGCCGGCGATAG | 2431 | 2450 | -14.2 | 792 |
| 7 | CACTCGGATCAGGCGCGTCC | 2466 | 2485 | -16.8 | 793 |
| 8 | GAATCTCCGGTCGCCACAGC | 2600 | 2619 | -20.4 | 794 |
| 9 | AGAATCTCCGGTCGCCACAG | 2601 | 2620 | -17.9 | 795 |
| 10 | CGCAGAGGTGCCCAGGCGGC | 2653 | 2672 | -20.9 | 796 |
| 11 | GTCACGTACACAATAGGTTG | 2713 | 2732 | -27.3 | 797 |
| 12 | TTTTTCGTGACTGTTGCTCC | 2752 | 2771 | -26 | 798 |
| 13 | GTGTTCGAGAGATCAAATCT | 2947 | 2966 | -25.3 | 799 |
| 14 | GGATTTTGGGCAAGCCGCCT | 3120 | 3139 | -28.5 | 800 |
| 15 | GCGCGCGTGCACACACACAC | 3558 | 3577 | -25.6 | 801 |
| 16 | CACCTTAGGTCCGAAGTAAT | 3729 | 3748 | -25.3 | 802 |
| 17 | TGGATAGCGGAAATGGTGGT | 3938 | 3957 | -32.8 | 803 |
| 18 | GTGGATAGCGGAAATGGTGG | 3939 | 3958 | -35 | 804 |
| 19 | GTACTTGGCACGATTTTCTG | 4095 | 4114 | -27.7 | 805 |
| 20 | AGGGGGCCCTCATCAAGTAG | 4200 | 4219 | -28.8 | 806 |
| 21 | TGTTAGGAATACTCGATTTT | 4602 | 4621 | -19.2 | 807 |
| 22 | GGTCAATCGTGATTCCTTTT | 5127 | 5146 | -25.7 | 808 |
| 23 | GTCACTGGACATAGCGTGGC | 5326 | 5345 | -27.3 | 809 |
| 24 | AGTCACTGGACATAGCGTGG | 5327 | 5346 | -26.3 | 810 |
| 25 | ATCCGGCCCTTAGTCACTCC | 5958 | 5977 | -30.6 | 811 |
| 26 | AATCCGGCCCTTAGTCACTC | 5959 | 5978 | -29.5 | 812 |
| 27 | TGAAAAATGGTTCCATTTTC | 6642 | 6661 | -20.7 | 813 |
| 28 | TCTGACACCCCGTCACCTCT | 6826 | 6845 | -22.4 | 814 |
| 29 | GCACATGCATAATCGCTCCT | 7189 | 7208 | -25.4 | 815 |
| 30 | TTACTTTTAATAATAGGAGC | 7539 | 7558 | -20.4 | 816 |
| 31 | TTTCATGACGGCAAGGACAA | 8113 | 8132 | -30.6 | 817 |
| 32 | ATTTCATGACGGCAAGGACA | 8114 | 8133 | -30.4 | 818 |
| 33 | TGGGATGAATTCCTACTGCC | 9176 | 9195 | -15.9 | 819 |
| 34 | GGTTAACGTCTAACTTGTCT | 9305 | 9324 | -21.8 | 820 |
| 35 | GCTAGGATTTAGACGAACTC | 9706 | 9725 | -27.3 | 821 |
| 36 | TTCATAACTGGATCTCTGAT | 10084 | 10103 | -23.1 | 822 |
| 37 | CAGTAGTTCCGGCCGCCCCC | 10629 | 10648 | -30.6 | 823 |
| 38 | CCAGTAGTTCCGGCCGCCCC | 10630 | 10649 | -29.7 | 824 |
| 39 | GTTATGCGAACGTGATCTCT | 11569 | 11588 | -27.2 | 825 |
| 40 | ATCATAGTTATGCGAACGTG | 11575 | 11594 | -21.1 | 826 |
| 41 | GTAGGCGTATAAACAGGTGC | 11955 | 11974 | -28.4 | 827 |
| 42 | TCCACTAAACAGCCGCTATC | 11986 | 12005 | -28.2 | 828 |
| 43 | ACCTCAGACCCACAAGTAGC | 13095 | 13114 | -30.9 | 829 |
| 44 | ACTCAGCTACACTTCATACT | 13740 | 13759 | -30.2 | 830 |
| 45 | CTCTGGGGTTCGAGCGATTC | 13946 | 13965 | -26 | 831 |
| 46 | CACAGAGACCGGTCCACCCA | 14322 | 14341 | -28.7 | 832 |
| 47 | AACTTGCACAATTCGGTCCA | 14375 | 14394 | -19.4 | 833 |
| 48 | GTCAAACACTGTGTAGTAGG | 14981 | 15000 | -25.9 | 834 |
| 49 | TTTAAGTTAGGGTCCCTGTG | 15226 | 15245 | -22.7 | 835 |
| 50 | GGAGCATGAAGCTGTCAGCT | 15396 | 15415 | -26.6 | 836 |
| 51 | CTAGCAGGTCACGGCAAGCT | 16135 | 16154 | -23.5 | 837 |
| 52 | GATGGTGAACGGACTCCTGA | 16632 | 16651 | -24.8 | 838 |
| 53 | CCATACCGGTTAGGTCCCCA | 16892 | 16911 | -22.4 | 839 |
| 54 | CTCCATCCATACCGGTTAGG | 16898 | 16917 | -23.7 | 840 |
| 55 | CCACATTATTCGGGCTCAAA | 17033 | 17052 | -19.4 | 841 |
| 56 | TGATCTGTCACTATCTCCCA | 17600 | 17619 | -21 | 842 |
| 57 | GTCACGGACTGGTACCAGAC | 17805 | 17824 | -26.7 | 843 |
| 58 | GCTCCTACTAACGTACTGTA | 17975 | 17994 | -29 | 844 |
| 59 | TGGGCATGGTGGCACGTGCT | 18228 | 18247 | -34.8 | 845 |
| 60 | GGACGAGACTGGTCATAGAT | 19153 | 19172 | -29.9 | 846 |
| 61 | TAATCCGGACGAGACTGGTC | 19159 | 19178 | -26 | 847 |
| 62 | TGAGGACAGGCACAATTTAT | 19615 | 19634 | -23.7 | 848 |
| 63 | GAACTCTCATTACCATATGA | 19632 | 19651 | -25.2 | 849 |
| 64 | ACCAGTCGTTGGCGCAGAGC | 20373 | 20392 | -23 | 850 |
| 65 | GGCTGAGGTGTGATGCAGGA | 20567 | 20586 | -34.2 | 851 |
| 66 | AATTGGCTGAGGTGTGATGC | 20571 | 20590 | -32 | 852 |
| 67 | AGGGCCGCCACACGAAAGAG | 20806 | 20825 | -25.6 | 853 |
| 68 | CAGCACGGTCGTAACTGCAA | 21180 | 21199 | -29.1 | 854 |
| 69 | AAGGCTTCCAGGAATCAGAG | 21215 | 21234 | -32.6 | 855 |
| 70 | GAATACAGATTCGGCATGGT | 21340 | 21359 | -25.9 | 856 |
| 71 | GCTAAGCGGGCCTTTGCTTA | 21419 | 21438 | -24.7 | 857 |
| 72 | GCCTTTTCTATGTGGAACCT | 21692 | 21711 | -24.9 | 858 |
| 73 | GCTCTCGCATAAGCTTTTCC | 21947 | 21966 | -21.2 | 859 |
| 74 | GCTGTGAAAGTAGCTTGGGA | 22239 | 22258 | -21 | 860 |
| 75 | AGGGCAGGGTGTTATCTTAT | 22632 | 22651 | -27.5 | 861 |
| 76 | ATTTCGCCTAGAACACATCC | 22840 | 22859 | -25.8 | 862 |
| 77 | GAATTTCCCGCTTGACGTGT | 22988 | 23007 | -26.7 | 863 |
| 78 | TGTGTTGGGACCGTGACCCA | 23022 | 23041 | -32.9 | 864 |
| 79 | TTGTGTTGGGACCGTGACCC | 23023 | 23042 | -34 | 865 |
| 80 | CTCATTACGTGGCTGGTCCC | 23551 | 23570 | -27.3 | 866 |
| 81 | CTCCACCTCCCTTGTTACCC | 24080 | 24099 | -31.8 | 867 |
| 82 | AGGATTCTCAGTGCAGGCTG | 24578 | 24597 | -22.6 | 868 |
| 83 | CATTCTTATCAGACCGTCTG | 24720 | 24739 | -21.6 | 869 |
| 84 | GAAAGCCGCTGATTACAACA | 25646 | 25665 | -23.5 | 870 |
| 85 | CCAGCAAGACTTTGACTATA | 26040 | 26059 | -25.2 | 871 |
| 86 | GTGACGGGTTGATAGGTGCA | 27560 | 27579 | -27.5 | 872 |
| 87 | TAATAGCTAGGTGACGGGTT | 27570 | 27589 | -26.9 | 873 |
| 88 | TGTAACTGGACCCAAGAATT | 27866 | 27885 | -27.2 | 874 |
| 89 | CATTATACCACGGCTCAATG | 28182 | 28201 | -25.9 | 875 |
| 90 | TCGAGGACATGGACCACACC | 28393 | 28412 | -31.4 | 876 |
| 91 | AGGCGGTAACATCGGCGATG | 28722 | 28741 | -31.3 | 877 |
| 92 | GTTCAGGCGGTAACATCGGC | 28726 | 28745 | -33 | 878 |
| 93 | TCTAAAGTACCGCTCATTTA | 29247 | 29266 | -17.3 | 879 |
| 94 | CCCCTTCTAAAGTACCGCTC | 29252 | 29271 | -23.5 | 880 |
| 95 | TCCTTAACCATAAATAGACA | 29755 | 29774 | -23.8 | 881 |
| 96 | CACCAGCGCGTAGTCACTGT | 29918 | 29937 | -28.4 | 882 |
| 97 | CCAAAATATAGCTATAATTA | 30189 | 30208 | -24.2 | 883 |
| 98 | CGTAATAGCCTTCGTACTGG | 30374 | 30393 | -30.1 | 884 |
| 99 | GCCAGGACTACCGTAATAGC | 30385 | 30404 | -29.6 | 885 |
| 100 | GATCACACCTCACTGCAGCC | 30635 | 30654 | -29.5 | 886 |
| 101 | CCACCCTAATCGAAGCCTGG | 30737 | 30756 | -27.2 | 887 |
| 102 | GCTATCTAAAGACTTAAAAC | 31655 | 31674 | -28.6 | 888 |
| 103 | GATAAACGAAACAGCGGCCC | 33095 | 33114 | -31.1 | 889 |
| 104 | GCTACCGAAAGGCTATCTGA | 33185 | 33204 | -30 | 890 |
| 105 | TAGCCGTAGCCATTACCCTC | 33338 | 33357 | -24.9 | 891 |
| 106 | TATCAGAACGCTTTTGAGCA | 33668 | 33687 | -20.3 | 892 |
| 107 | GCACATCTTCATAAAATCTG | 33833 | 33852 | -24.2 | 893 |
| 108 | TCAGATCCAGATCAAAGTTA | 34000 | 34019 | -28.3 | 894 |
| 109 | GCACACCGGCCCCTACCGCC | 34198 | 34217 | -29.3 | 895 |
| 110 | ATACCACGTCTGCGCCTGAC | 34466 | 34485 | -27.4 | 896 |
| 111 | GACGAGCTCAGCGCTAAGGA | 34759 | 34778 | -23.1 | 897 |
| 112 | GGCCATCCTCACGATACCAG | 34834 | 34853 | -32.8 | 898 |
| 113 | GACTTCGAAGCACGGTCCCC | 35166 | 35185 | -28.2 | 899 |
| 114 | TGCCTTCTCCTTGCACAAGA | 35214 | 35233 | -30.9 | 900 |
| 115 | CTCCAAAACCTTCGGATGCA | 35732 | 35751 | -26.3 | 901 |
| 116 | TCTCCAAAACCTTCGGATGC | 35733 | 35752 | -24.8 | 902 |
| 117 | TGTAATTACACACTTAGAGA | 36353 | 36372 | -21.4 | 903 |
| 118 | ACACTCACACTCCATTTCTC | 36832 | 36851 | -24.1 | 904 |
| 119 | CTCTTACGATCCTAACTAGA | 37382 | 37401 | -23 | 905 |
| 120 | TGATCATGAGTTCTTTCTTC | 37782 | 37801 | -28.1 | 906 |
| 121 | TAATGTACGGTATCCACACA | 38083 | 38102 | -21.1 | 907 |
| 122 | GGTGAAGAAAACATTAATGG | 38212 | 38231 | -24.3 | 908 |
| 123 | ATGATAACGAGCAGCCATAA | 38510 | 38529 | -22.9 | 909 |
| 124 | TCCCATTACAAACATAGACA | 38931 | 38950 | -24.6 | 910 |
| 125 | TGTCTACTCCGGTGTGTTTT | 39374 | 39393 | -33.7 | 911 |
| 126 | CCTGTCTACTCCGGTGTGTT | 39376 | 39395 | -34.3 | 912 |
| 127 | ATTAACGGAAGAACGTGGAT | 40000 | 40019 | -19.8 | 913 |
| 128 | AAAAGCATGTGACCTAACAC | 40819 | 40838 | -24.8 | 914 |
| 129 | AATCCGAGCCAATTACATAG | 41106 | 41125 | -26.2 | 915 |
| 130 | TAAAGCATCACTTCGAAGGT | 41333 | 41352 | -21.9 | 916 |
| 131 | TCCAAGATCGTAGAAAGGAG | 41534 | 41553 | -23.4 | 917 |
| 132 | TATCCTGCTTCAGCATCCCA | 42352 | 42371 | -26.1 | 918 |
| 133 | TATGTGTGGCAAGTCCCAGA | 42643 | 42662 | -30.2 | 919 |
| 134 | AGCGCAGAAGAACGTGTGAC | 43388 | 43407 | -20.3 | 920 |
| 135 | CAGCATTCCGCTTCAGCACA | 43875 | 43894 | -26.3 | 921 |
| 136 | AAATCAGGGTAGAGAAGATC | 44448 | 44467 | -25.6 | 922 |
| 137 | CCAAGTTGTTTGGCTCATTG | 44707 | 44726 | -24 | 923 |
| 138 | GGCTTGTTCGCTCACATGGG | 44873 | 44892 | -26.9 | 924 |
| 139 | TCACATTCCCACGAAGGATC | 45030 | 45049 | -20.7 | 925 |
| 140 | TGTTCTATCTACCCGGCTGG | 45342 | 45361 | -23.2 | 926 |
| 141 | ACCATGCTACGAAGAGACAT | 46047 | 46066 | -24.9 | 927 |
| 142 | TACCATGCTACGAAGAGACA | 46048 | 46067 | -25.2 | 928 |
| 143 | TGGTGGTGCAGTTGTCTTGG | 46282 | 46301 | -30.3 | 929 |
| 144 | TGAGAAGACAAGCCACAGAC | 46618 | 46637 | -30.4 | 930 |
| 145 | TGAGCATGGCGAAGGATTCT | 46740 | 46759 | -27 | 931 |
| 146 | TGCATGTAGGCAGGGGAAGG | 47484 | 47503 | -26.2 | 932 |
| 147 | TACAACAGGAACACCCTATT | 47943 | 47962 | -22.8 | 933 |
| 148 | ATGACTGCAGCACTGTTTGG | 48969 | 48988 | -27.9 | 934 |
| 149 | GGTCTCTCGTTTGCAAGATG | 49167 | 49186 | -27 | 935 |
| 150 | GTGTAAGGTCTCTCGTTTGC | 49173 | 49192 | -27.1 | 936 |
| 151 | AGCCGTCAACACATTATTAT | 49446 | 49465 | -24.8 | 937 |
| 152 | ACTTCAACTGATCCGCCTGC | 49553 | 49572 | -27.1 | 938 |
| 153 | TAAGCATCTTAATATCAACA | 50315 | 50334 | -23 | 939 |
| 154 | GCGGAGCACTGCACGGGATG | 50946 | 50965 | -24.8 | 940 |
| 155 | ATAGCGGAGCACTGCACGGG | 50949 | 50968 | -20.8 | 941 |
| 156 | TGAAGTTTGTGTGTGGCACT | 51023 | 51042 | -22.8 | 942 |
| 157 | GCTTGGGACACGGATTAGGA | 51920 | 51939 | -30.9 | 943 |
| 158 | GTCTATAGGGACTTATGGGG | 52011 | 52030 | -22.6 | 944 |
| 159 | GTGGTCAGGAGTATAGTGAA | 52465 | 52484 | -24.7 | 945 |
| 160 | GGGTGGAAGAAAAGGGAAAA | 52763 | 52782 | -27.6 | 946 |
| 161 | GTATAACATGTTGCAGGGTG | 53386 | 53405 | -31.2 | 947 |
| 162 | GGAGTACTTATAGGTCCTGT | 54651 | 54670 | -25.3 | 948 |
| 163 | TTGAGCCCAGGCGTTTGTGG | 55392 | 55411 | -27.1 | 949 |
| 164 | CGGTCAGGCACAATGGCTCA | 55457 | 55476 | -23 | 950 |
| 165 | AGATTGTCTCATTTTTTGAT | 55835 | 55854 | -17.1 | 951 |
| 166 | AGTCTGCGTGGAGGAAAGTA | 56684 | 56703 | -22.8 | 952 |
| 167 | TCTTTCAACAAGCTGTGCCC | 56969 | 56988 | -30.2 | 953 |
| 168 | TTCTTTCAACAAGCTGTGCC | 56970 | 56989 | -26.7 | 954 |
| 169 | TTCTGGCCCTTCATAATGAA | 57563 | 57582 | -28.9 | 955 |
| 170 | CAGACGCTTGATAAGATCAG | 57683 | 57702 | -19.5 | 956 |
| 171 | TGATGCGCACCATAGGAACA | 57843 | 57862 | -30.1 | 957 |
| 172 | TGGCTAGCTCTAATCCAGGA | 58381 | 58400 | -25.5 | 958 |
| 173 | TGGAGCAAGTCGGTAGAGCC | 58480 | 58499 | -28.5 | 959 |
| 174 | GATGATCACAGACAGATAAG | 58849 | 58868 | -25.1 | 960 |
| 175 | TCCTGTCACAGTCCTGGTAA | 58962 | 58981 | -26.8 | 961 |
| 176 | GAGCATACTCATGCCTGTTG | 59212 | 59231 | -22.8 | 962 |
| 177 | GCCATGATTACTTGCTAACA | 59253 | 59272 | -22.1 | 963 |
| 178 | AAGGGATCAAGAGCTGCTCT | 59674 | 59693 | -32 | 964 |
| 179 | GAGAGATTTCTTGGTTTCCC | 60147 | 60166 | -22.1 | 965 |
| 180 | GAGGGCCTAAGTGACACGAG | 60626 | 60645 | -23 | 966 |
| 181 | CCTGAGCACCCAGCACTCCC | 60707 | 60726 | -19.7 | 967 |
| 182 | AGGAGCTACTGTGAATTACA | 61211 | 61230 | -29.9 | 968 |
| 183 | GGGCAGACTGGCTCGTAGGG | 61640 | 61659 | -35 | 969 |
| 184 | GCATGATGTGAAGATCCCCC | 62182 | 62201 | -26.6 | 970 |
| 185 | TGACTGGCAATATTTCTTCC | 62457 | 62476 | -23 | 971 |
| 186 | TACTTATGCACGGTTGCAGA | 63587 | 63606 | -20.9 | 972 |
| 187 | GCATACATACGCTGACGCAC | 63618 | 63637 | -19.2 | 973 |
| 188 | TAACTGCCCGCCTTTTCAAC | 64015 | 64034 | -27.2 | 974 |
| 189 | CTCTACTCTCACTGGCTTGT | 64249 | 64268 | -34 | 975 |
| 190 | ATGGTTCGGTATTATTCAGC | 64463 | 64482 | -30.8 | 976 |
| 191 | CCTATTTTCCCCCCCAAAGT | 64683 | 64702 | -27.7 | 977 |
| 192 | GTTGACATCGGAAGCTGGTC | 64869 | 64888 | -27.5 | 978 |
| 193 | CAGACTCACCGTATGTAGTG | 64952 | 64971 | -26.6 | 979 |
| 194 | GCCACTTTTAAAGCCCCTTT | 65260 | 65279 | -26.4 | 980 |
| 195 | ACGTTCAGGTAATCCCAAGG | 65807 | 65826 | -30.3 | 981 |
| 196 | AGAGCTGACAAAAACGACGA | 65911 | 65930 | -26.7 | 982 |
| 197 | GACTGACACCCGAGATACTG | 66212 | 66231 | -33 | 983 |
| 198 | GGAGGTAGCTCAACCCGTGT | 66303 | 66322 | -28.8 | 984 |
| 199 | CAAAGGGAATTAAACTTGCA | 66363 | 66382 | -21.7 | 985 |
| 200 | TGCAAGCTATATCCGGAGAT | 66515 | 66534 | -27.8 | 986 |
| 201 | GGTTACTTCCAGTACGACAA | 66607 | 66626 | -23.8 | 987 |
| 202 | AGCGAAGACATTTACAAGAG | 67068 | 67087 | -19.8 | 988 |
| 203 | GTAGGTAGGAGCGTGTCAAT | 67545 | 67564 | -28.7 | 989 |
| 204 | GTACCTGATCGAGCAATGCC | 68462 | 68481 | -27.7 | 990 |
| 205 | CAAGTACCTGATCGAGCAAT | 68465 | 68484 | -26.1 | 991 |
| 206 | GGACCTTGGAGTAGTGTGGA | 69273 | 69292 | -31.2 | 992 |
| 207 | CTCTGTTGTCCAGCCTGGAG | 69783 | 69802 | -27.2 | 993 |
| 208 | CAGTGTTCAGAACGGGCCCC | 70332 | 70351 | -28 | 994 |
| 209 | CCCTCAAATTCCCTGAATCT | 70418 | 70437 | -26.3 | 995 |
| 210 | GAAATCTTAGCGAACAAATT | 71062 | 71081 | -22.1 | 996 |
| 211 | GTGACGAAAATGGCACTTTA | 71992 | 72011 | -26.8 | 997 |
| 212 | GGTATGGGGTAAGCATCCTG | 72158 | 72177 | -27.8 | 998 |
| 213 | CAACATAGTGGGGCCTTGTT | 72555 | 72574 | -30.4 | 999 |
| 214 | TTCCAAACTTTAGCTTCTGG | 73695 | 73714 | -25.5 | 1000 |
| 215 | CCAGGTGCTCACTCCTTTGG | 74301 | 74320 | -29.2 | 1001 |
| 216 | GCCCAGGTGCTCACTCCTTT | 74303 | 74322 | -30 | 1002 |
| 217 | GTGGGATATCCCGTTGCTGG | 74820 | 74839 | -30.5 | 1003 |
| 218 | GCTTCACAAAGGATTTTAAT | 75409 | 75428 | -15.7 | 1004 |
| 219 | GGGGTACAAGTGCAGTTTTG | 75663 | 75682 | -30.7 | 1005 |
| 220 | GCAGGGGGTATTACATCCAC | 76132 | 76151 | -21.7 | 1006 |
| 221 | GACGCAGGGGGTATTACATC | 76135 | 76154 | -28.3 | 1007 |
| 222 | CCTTCCCGTACCTAAGATGC | 76668 | 76687 | -26.2 | 1008 |
| 223 | CCCATCCCCACGATACATCT | 76704 | 76723 | -27.6 | 1009 |
| 224 | GGCTTATTTATTCTGCCGAA | 77005 | 77024 | -21.9 | 1010 |
| 225 | TTTCAGACAGTGGTAACTAC | 77557 | 77576 | -24.9 | 1011 |
| 226 | GTGCCTCCAGTTAACTCTGT | 78289 | 78308 | -29.3 | 1012 |
| 227 | TACGGCCTAGCATCTACATG | 78347 | 78366 | -30.1 | 1013 |
| 228 | GCATGCAATGCTCGAGTGCT | 78609 | 78628 | -26.3 | 1014 |
| 229 | GCTATCTGCTAGCGGATTCT | 79357 | 79376 | -26.3 | 1015 |
| 230 | CAGAGAGGACGATCGGTGGA | 79761 | 79780 | -28.7 | 1016 |
| 231 | CTGCAGAGAGGACGATCGGT | 79764 | 79783 | -32.6 | 1017 |
| 232 | CTACGAACTACACTGCCTGG | 80310 | 80329 | -27.6 | 1018 |
| 233 | CTCTCCTGGAGCTACGAACT | 80321 | 80340 | -29.3 | 1019 |
| 234 | GTGAGGTAACGTGATCCTGG | 81597 | 81616 | -29.4 | 1020 |
| 235 | TTTGGTGAGGTAACGTGATC | 81601 | 81620 | -26.9 | 1021 |
| 236 | CCTGACTTCCCGACCTGAGC | 83098 | 83117 | -25.3 | 1022 |
| 237 | CTTTCAAGTCAAGCTGCTTG | 83394 | 83413 | -22.1 | 1023 |
| 238 | CCTTTAAAAAGGAACACAAA | 83942 | 83961 | -22.5 | 1024 |
| 239 | GTACACTTCGCCACTAAAAA | 84172 | 84191 | -29.7 | 1025 |
| 240 | CCAGATACTCCCCAGTGTCT | 84657 | 84676 | -28.8 | 1026 |
| 241 | GATGACGATGCAACACTCAG | 85537 | 85556 | -28.5 | 1027 |
| 242 | CAGATGACGATGCAACACTC | 85539 | 85558 | -25.8 | 1028 |
| 243 | GCGATGCCGTCTCCTGACAG | 85725 | 85744 | -24.3 | 1029 |
| 244 | GCAGAAAAGGCTTACAACAC | 86165 | 86184 | -24.7 | 1030 |
| 245 | AGAAAGATCCTTCTCCAAGT | 86307 | 86326 | -20.8 | 1031 |
| 246 | ATCATTCTGAGCAAACTATC | 86647 | 86666 | -17.6 | 1032 |
| 247 | GAACATTTTTAGTTTCTTGT | 86871 | 86890 | -21.1 | 1033 |
| 248 | CCATCAGTCACCGGAGCCTG | 87262 | 87281 | -28.1 | 1034 |
| 249 | GACTCTAAAGCGGCACTGCC | 87417 | 87436 | -26.1 | 1035 |
| 250 | GAATTCCGACAAGACAGGTC | 87783 | 87802 | -32 | 1036 |
| 251 | GCATGTGTTCGGATGAAGTC | 88203 | 88222 | -32.1 | 1037 |
| 252 | CGCACAGCGTCCCCCCTCTC | 88330 | 88349 | -30 | 1038 |
| 253 | AAGGGATCTTCACGGGCACA | 88440 | 88459 | -23.7 | 1039 |
| 254 | ATTGCCTCGGTAAGTGATGG | 89134 | 89153 | -28.1 | 1040 |
| 255 | GGGTTTCAATTGCCTCGGTA | 89142 | 89161 | -29.4 | 1041 |
| 256 | ATCTCAATAATCTATCACTG | 89353 | 89372 | -23.5 | 1042 |
| 257 | GTCTGATCAACCGACAGCCC | 89525 | 89544 | -27.3 | 1043 |
| 258 | GGTCACGTAGTATCTTACTT | 89900 | 89919 | -20.8 | 1044 |
| 259 | CAGGTCACGTAGTATCTTAC | 89902 | 89921 | -22.9 | 1045 |
| 260 | AGTGATCCTTCCACCTCAGT | 90707 | 90726 | -21.9 | 1046 |
| 261 | CCCTAGACTGGCGATACATT | 91226 | 91245 | -22.7 | 1047 |
| 262 | TGAGAGCCCTAGACTGGCGA | 91232 | 91251 | -24.4 | 1048 |
| 263 | GCCACACGGTATTATCCTAA | 91863 | 91882 | -25.5 | 1049 |
| 264 | GCCCCACAATCACTTCTCTA | 92287 | 92306 | -27.8 | 1050 |
| 265 | TGAGAAGAAATTTTATAACT | 92529 | 92548 | -20.9 | 1051 |
| 266 | CCATCTTGAAGGGCGGAACC | 92781 | 92800 | -25.5 | 1052 |
| 267 | CTGTCGGTTGAGCAATAGTG | 92853 | 92872 | -22.8 | 1053 |
| 268 | CTTGCGATTTTGCTCCAGGT | 93398 | 93417 | -29.3 | 1054 |
| 269 | TGAGCGTCCAGTCTGACCAC | 93606 | 93625 | -29 | 1055 |
| 270 | GGGACAACGGCTAAGTTCAG | 94067 | 94086 | -28.1 | 1056 |
| 271 | TGGCCATGAGATTTGCATAC | 94515 | 94534 | -25 | 1057 |
| 272 | TACGGATGTGTTTTGGCCAG | 94735 | 94754 | -24.7 | 1058 |
| 273 | GAGAGCCGGTATAAACTACA | 94842 | 94861 | -29.7 | 1059 |
| 274 | GTGAGAGAGCCGGTATAAAC | 94846 | 94865 | -30.2 | 1060 |
| 275 | TTATACATCTCACGACCAAG | 95398 | 95417 | -20.4 | 1061 |
| 276 | TCTCTGAAAATAAGCTATTC | 95605 | 95624 | -18.7 | 1062 |
| 277 | TCTTCGTTATTATGCTGAAC | 96002 | 96021 | -25 | 1063 |
| 278 | GCCTTCGCCGACCAGGGCCT | 96161 | 96180 | -31.3 | 1064 |
| 279 | GAGGGGGAACGCACAGTGGC | 96452 | 96471 | -35 | 1065 |
| 280 | GGAGGGGGAACGCACAGTGG | 96453 | 96472 | -35 | 1066 |
| 281 | CTAATGGGTGGCGATCACAT | 96587 | 96606 | -24.8 | 1067 |
| 282 | TCAGTGGTCCAAATCTCTTT | 96881 | 96900 | -23.1 | 1068 |
| 283 | TTAAATCAGTGGTCCAAATC | 96886 | 96905 | -24.4 | 1069 |
| 284 | GTCTATGTTGTAGAATTCCC | 97458 | 97477 | -16.2 | 1070 |
| 285 | GTTGTTATATGCTTTTTACC | 98177 | 98196 | -17.2 | 1071 |
| 286 | TATTGCCGCAGGATATCAAC | 98698 | 98717 | -21.8 | 1072 |
| 287 | GAGAGGCGTTTGCAAGTGAC | 98836 | 98855 | -30.7 | 1073 |
| 288 | CTTGTGTACGGTTCCTAAGA | 98938 | 98957 | -26.7 | 1074 |
| 289 | AACCAGAATATTGGAACAAA | 99199 | 99218 | -20.3 | 1075 |
| 290 | GAGCCAAGGTGTCGCCACCG | 99631 | 99650 | -20.5 | 1076 |
| 291 | GCTGGTGTGCACCTGTAGTC | 100329 | 100348 | -33.5 | 1077 |
| 292 | CAAAATACTTAATGAGGTGG | 100619 | 100638 | -21.9 | 1078 |
| 293 | TCACAGATATATCCGTCTTT | 101034 | 101053 | -23.6 | 1079 |
| 294 | GTCACAGATATATCCGTCTT | 101035 | 101054 | -27.3 | 1080 |
| 295 | CACTACGGTGCGAGTCAGTC | 101136 | 101155 | -23.9 | 1081 |
| 296 | GTATTCGCTGGACTAAGTCC | 101170 | 101189 | -25.1 | 1082 |
| 297 | TCCTCACCGTAATGACCACA | 101338 | 101357 | -28.1 | 1083 |
| 298 | GGGGGTACAAGAGCGGGCTC | 101360 | 101379 | -31.1 | 1084 |
| 299 | ACTGACCGGTCTGGCAGTCT | 101714 | 101733 | -27.5 | 1085 |
| 300 | GCTCCTAGAAACCTGCGGGT | 101916 | 101935 | -26.5 | 1086 |
| 301 | GGACACACCTGGGGGCAACA | 102193 | 102212 | -28.9 | 1087 |
| 302 | TCCCAGGGCGCTATCTGAGC | 102312 | 102331 | -27.7 | 1088 |
| 303 | GAAGGACAGGTGGGAAACCG | 102585 | 102604 | -26.3 | 1089 |
| 304 | AGCCACGGACCTTCTCTGCA | 102753 | 102772 | -27.2 | 1090 |
| 305 | CACGACAGTGCGGAAGAACA | 102942 | 102961 | -23.4 | 1091 |
| 306 | TTCAGGGTGGTCCATGTCAC | 103191 | 103210 | -30.6 | 1092 |
| 307 | GGTGCCTCACTAGCCCTAGC | 103607 | 103626 | -27.6 | 1093 |
| 308 | TCGGTCCTCACCGTGACGGC | 104008 | 104027 | -23.7 | 1094 |
| 309 | TCCCACTTCACATAAATATA | 104510 | 104529 | -26.9 | 1095 |
| 310 | CATCAGACATCGTTTTGGAC | 104872 | 104891 | -25.8 | 1096 |
| 311 | TAACACCCACGCATGGCTGC | 105548 | 105567 | -26.8 | 1097 |
| 312 | CATAGACCAGAGCGCCAGTT | 105710 | 105729 | -30.3 | 1098 |
| 313 | CTACCATAGACCAGAGCGCC | 105714 | 105733 | -33.2 | 1099 |
| 314 | CCTGTGCCTATAATCCTGTC | 106475 | 106494 | -23.7 | 1100 |
| 315 | CTGAAACCGTATTACTTTAC | 106811 | 106830 | -23.2 | 1101 |
| 316 | ACTGAGATGAGGTCTTGCTC | 107638 | 107657 | -27.8 | 1102 |
| 317 | GACGGGGTTTCACTGTGTTC | 107892 | 107911 | -22.4 | 1103 |
| 318 | GCTAGAGGCCTGAGGCACTG | 108781 | 108800 | -31.9 | 1104 |
| 319 | CTGCACAAGGCGGTGGAAGT | 109251 | 109270 | -26.1 | 1105 |
| 320 | GCCCAAATTCAATCCGTGGC | 110226 | 110245 | -27.3 | 1106 |
| 321 | TCTGATCTTCTGTGTATCTG | 110268 | 110287 | -27.6 | 1107 |
| 322 | GCTCCAGACTTTAGGTAAGG | 111305 | 111324 | -27.6 | 1108 |
| 323 | TCTTGGGTAGGGATTCGCAA | 111502 | 111521 | -27.7 | 1109 |
| 324 | GCTTGTATGCGCTTGCCCTC | 111709 | 111728 | -32.2 | 1110 |
| 325 | CCTACTTGGGAGTCAGTGTG | 112167 | 112186 | -30.9 | 1111 |
| 326 | CCGCCTTGTGCGCACGTTCT | 112372 | 112391 | -31.5 | 1112 |
| 327 | GGGTCATCAGCGAAAGGGGC | 112485 | 112504 | -24.9 | 1113 |
| 328 | TCTTTTGTGAAGTGTCTGTT | 112790 | 112809 | -25.6 | 1114 |
| 329 | CAGACCATACAAGGTCGTCC | 113802 | 113821 | -20.9 | 1115 |
| 330 | TTGGCTTCATTTGAACTCCC | 114144 | 114163 | -16.6 | 1116 |
| 331 | ATCAGGCAGGGAGCTTGCAG | 114538 | 114557 | -25.5 | 1117 |
| 332 | GGCACTCCCCACATCTCAGA | 115044 | 115063 | -26.5 | 1118 |
| 333 | CACCTCCCAGACAGGGTTGC | 115075 | 115094 | -28.5 | 1119 |
| 334 | CCCAGACGGGGTGGCGGCCA | 115474 | 115493 | -31.3 | 1120 |
| 335 | AGAGAGCACCCGGTTGGGGG | 115697 | 115716 | -33.9 | 1121 |
| 336 | TTTATTTATTTATTTTATTT | 116076 | 116095 | -13.6 | 1122 |
| 337 | GTTTCCGACTTTTAGCCCAA | 116878 | 116897 | -22.5 | 1123 |
| 338 | CCACATGCACTGCACTGCTC | 117480 | 117499 | -29.6 | 1124 |
| 339 | GGTACTTCCTCGCATACGCT | 117817 | 117836 | -27.5 | 1125 |
| 340 | CAGAGGTAGGGTTTTGCCAT | 117958 | 117977 | -21.3 | 1126 |
| 341 | TCCTTCACCAACTCTAAAAT | 118437 | 118456 | -30.9 | 1127 |
| 342 | GTGCTCAAATGTTCGTCCTG | 118606 | 118625 | -22.3 | 1128 |
| 343 | TAAATGCCTAGGACATTCCA | 119013 | 119032 | -25.5 | 1129 |
| 344 | AAGGTGGACAGCCAGTCTCC | 119318 | 119337 | -27.8 | 1130 |
| 345 | AACGGCAGCCAGGGTATCAA | 119500 | 119519 | -30.2 | 1131 |
| 346 | GTCCAACGGCAGCCAGGGTA | 119504 | 119523 | -33.1 | 1132 |
| 347 | GACTTGGAGTTTGGGCATGG | 120118 | 120137 | -31.7 | 1133 |
| 348 | AGAAGTTAGTAAATAGTGAA | 120332 | 120351 | -26.3 | 1134 |
| 349 | AACAAACTAGAGGGAAGTCT | 121121 | 121140 | -23.8 | 1135 |
| 350 | AGAACCAGCAGAACCTTTTC | 121291 | 121310 | -23.9 | 1136 |
| 351 | GTCTCCTGGGTAGCTGGAAT | 121769 | 121788 | -29 | 1137 |
| 352 | GATTCTGCAAGCTTAGGTTA | 122341 | 122360 | -30.6 | 1138 |
| 353 | AGATTCTGCAAGCTTAGGTT | 122342 | 122361 | -30.1 | 1139 |
| 354 | AATTCTAGCTTTTGCAAAGG | 122599 | 122618 | -19.5 | 1140 |
| 355 | ATTTTTCCCATTGAAAGGAA | 123214 | 123233 | -20.4 | 1141 |
| 356 | TGAAAACTTCGTGCGGACCA | 123381 | 123400 | -28.5 | 1142 |
| 357 | CCCAGACAGCAATTAGTACA | 123796 | 123815 | -23.5 | 1143 |
| 358 | GTGAGACTGCAATCGGGTCC | 123940 | 123959 | -22 | 1144 |
| 359 | TTTCATGTTGTCCGTCACTT | 124538 | 124557 | -23.7 | 1145 |
| 360 | CTATCCTGTTGCGAGTTTTA | 124788 | 124807 | -16.2 | 1146 |
| 361 | GTTTCACGGAAGAGCTATTA | 124818 | 124837 | -11.4 | 1147 |
| 362 | CTTTTCTAAGAGTGTATAGG | 125447 | 125466 | -17.9 | 1148 |
| 363 | GCTCTACCCAGCTATATGCC | 125658 | 125677 | -22.4 | 1149 |
| 364 | GGGTAAACAGGTTTGCATCA | 125818 | 125837 | -25.4 | 1150 |
| 365 | CCAGCTACGCTCAGTGGTCT | 126034 | 126053 | -21.9 | 1151 |
| 366 | TTTTAAAGTATTTTATAATA | 126231 | 126250 | -15.4 | 1152 |
| 367 | TGCAAGAGTACGCTTCAGCT | 126564 | 126583 | -29.7 | 1153 |
| 368 | TCATACTACTGCACTATAAC | 127217 | 127236 | -24.4 | 1154 |
| 369 | TACATTGTGTCAGGTGGATG | 127795 | 127814 | -27.3 | 1155 |
| 370 | CTTCTAGACCATTAGGCCTG | 127950 | 127969 | -28.3 | 1156 |
| 371 | CTCCTGTAGTCTATCTTCAA | 128764 | 128783 | -25.3 | 1157 |
| 372 | ACTCACCCCAGTACGACACC | 128853 | 128872 | -28.6 | 1158 |
| 373 | AGAACTCACCCCAGTACGAC | 128856 | 128875 | -29.6 | 1159 |
| 374 | GGCACGTATCTGATGGACTC | 128988 | 129007 | -30.8 | 1160 |
| 375 | AACAAAGCACGACCAGCCTA | 129083 | 129102 | -27.5 | 1161 |
| 376 | TACTAGAAACGGGCAGTGTG | 129149 | 129168 | -24.5 | 1162 |
| 377 | TTCTTCTCCCAAGTGAGGGG | 129535 | 129554 | -22.2 | 1163 |
| 378 | GCCAAGAGCCGAACAACACA | 129658 | 129677 | -28.2 | 1164 |
| 379 | AACTTAAAAGTATAATAATA | 129855 | 129874 | -17.4 | 1165 |
| 380 | ACCTGCACGTTTTGCACATG | 129883 | 129902 | -26.4 | 1166 |
| 381 | ACACTGTTGATGGGAGTCTA | 130446 | 130465 | -29.3 | 1167 |
| 382 | GACACTTCTCAAAAGAAGAC | 130636 | 130655 | -24.3 | 1168 |
| 383 | CAGACACTTCTCAAAAGAAG | 130638 | 130657 | -23 | 1169 |
| 384 | TACAAAGAACTTAAACAAAT | 130705 | 130724 | -23.3 | 1170 |
| 385 | ATCAGAGTGAGCAGGCAACT | 130786 | 130805 | -30.2 | 1171 |
| 386 | GGCATAGGCATGGGCAAAGA | 130906 | 130925 | -28 | 1172 |
| 387 | GCAGTGGGGAAAGGATTCCC | 131092 | 131111 | -25.2 | 1173 |
| 388 | GAAAATGGCCATACTCCCCA | 131425 | 131444 | -27.8 | 1174 |
| 389 | TTTGGAAAACCCCAACATTT | 131739 | 131758 | -20 | 1175 |
| 390 | GCACAAGACAAGGATGCTCT | 131901 | 131920 | -28.3 | 1176 |
| 391 | ACACTGGCAAACTGAATCCA | 132237 | 132256 | -26.2 | 1177 |
| 392 | AAATGTCCAGGACCAGATGG | 132470 | 132489 | -24.5 | 1178 |
| 393 | CTCTACTCAAATAAACTAGA | 132623 | 132642 | -20.8 | 1179 |
| 394 | AGATCACCACTGATCCCACA | 132679 | 132698 | -22.2 | 1180 |
| 395 | CTAGAGAAGCAAGAGCAAAC | 132901 | 132920 | -29.9 | 1181 |
| 396 | GAACTAGAGAAGCAAGAGCA | 132904 | 132923 | -30.7 | 1182 |
| 397 | AACAATGACACAGTGTACCC | 133036 | 133055 | -27.8 | 1183 |
| 398 | ACTCTCCACCCCAAATCAAC | 133318 | 133337 | -27.7 | 1184 |
| 399 | TGTGCTGTATTCAGGAGACA | 133744 | 133763 | -27.5 | 1185 |
| 400 | GGAAAAAGCGGTACCAGCCA | 133964 | 133983 | -29.7 | 1186 |
| 401 | ATGGTCAGATTCACGGAGGT | 134439 | 134458 | -26.4 | 1187 |
| 402 | TGGATCAATCAAGCAGAAGA | 134760 | 134779 | -28.3 | 1188 |
| 403 | GGTGAATTGCTAACTAGAAT | 134868 | 134887 | -18 | 1189 |
| 404 | GAGCTCTGGCTGGAATCTGG | 135382 | 135401 | -29.8 | 1190 |
| 405 | AGGGGCGGCTGTAGGCACAG | 135575 | 135594 | -24.6 | 1191 |
| 406 | CGACCTGGGACGTTTGAGGT | 135843 | 135862 | -28.7 | 1192 |
| 407 | GGGGTGTTGCCTTACTCGGG | 136255 | 136274 | -26.8 | 1193 |
| 408 | GCTTATGATTACACGTGTTG | 136514 | 136533 | -25.8 | 1194 |
| 409 | GCCAGGTGTCATGAAAAAAA | 136812 | 136831 | -27.2 | 1195 |
| 410 | GAGGCAGGTCGTTGGATTCA | 137470 | 137489 | -23.7 | 1196 |
| 411 | AAAGTGTTCACGACAATCAC | 137742 | 137761 | -26 | 1197 |
| 412 | AAACATACGGTTTCAGACTG | 138304 | 138323 | -22.9 | 1198 |
| 413 | GATAAAACATACGGTTTCAG | 138308 | 138327 | -24.7 | 1199 |
| 414 | ACAAAACTTAATGCACTCAT | 139058 | 139077 | -21.2 | 1200 |
| 415 | AAGAGTGAGTTTTGGAACAT | 139584 | 139603 | -25.5 | 1201 |
| 416 | GGTGTACGGCGTGTGAGCGG | 139844 | 139863 | -35 | 1202 |
| 417 | GGGTGGTGTACGGCGTGTGA | 139848 | 139867 | -34.2 | 1203 |
| 418 | AGTTGAAGAAACCCTAAAGG | 140000 | 140019 | -23.1 | 1204 |
| 419 | GTGTAAACGGCAGTTCCATG | 140365 | 140384 | -29.3 | 1205 |
| 420 | ATGTGTAAACGGCAGTTCCA | 140367 | 140386 | -27.2 | 1206 |
| 421 | CGGCTGCCGGTCATATGACT | 2027 | 2046 | -14.5 | 1207 |
| 422 | CCGGCTGCCGGTCATATGAC | 2028 | 2047 | -17.3 | 1208 |
| 423 | CTGCTCGGCGCCGGAGCCGC | 2047 | 2066 | -15.6 | 1209 |
| 424 | GAGTAACTCTGCTCGGCGCC | 2055 | 2074 | -17.4 | 1210 |
| 425 | CGCTGCGACTGAGTAACTCT | 2065 | 2084 | -29.4 | 1211 |
| 426 | GCCGCTGCGACTGAGTAACT | 2067 | 2086 | -25.8 | 1212 |
| 427 | GGCCGCTGCGACTGAGTAAC | 2068 | 2087 | -27.4 | 1213 |
| 428 | GGCCGCCCAGCCTTGCGGGA | 2094 | 2113 | -19 | 1214 |
| 429 | CGGCCGCCCAGCCTTGCGGG | 2095 | 2114 | -17.3 | 1215 |
| 430 | CGCGGCCGCCCAGCCTTGCG | 2097 | 2116 | -14.8 | 1216 |
| 431 | CGCGGTGGCGGGGCCATCGC | 2122 | 2141 | -14.1 | 1217 |
| 432 | CCGCGGTGGCGGGGCCATCG | 2123 | 2142 | -20.5 | 1218 |
| 433 | GGGGCCGGCGGCTCAGCGCG | 2159 | 2178 | -25.3 | 1219 |
| 434 | TGGCGCTCGGGGGGCCGGCG | 2169 | 2188 | -19.7 | 1220 |
| 435 | GGGCCATGATGCCGCCGCCG | 2201 | 2220 | -24 | 1221 |
| 436 | GGGGCCATGATGCCGCCGCC | 2202 | 2221 | -22.6 | 1222 |
| 437 | CGGGGCCATGATGCCGCCGC | 2203 | 2222 | -22.5 | 1223 |
| 438 | TCGGGGCCATGATGCCGCCG | 2204 | 2223 | -24.1 | 1224 |
| 439 | AGACGCCGCCGCGGAGCTGC | 2263 | 2282 | -13.7 | 1225 |
| 440 | ACCTAAAGGCGGGTCCTTCC | 2303 | 2322 | -10.4 | 1226 |
| 441 | CACCTAAAGGCGGGTCCTTC | 2304 | 2323 | -10 | 1227 |
| 442 | TCACCTAAAGGCGGGTCCTT | 2305 | 2324 | -11.3 | 1228 |
| 443 | CTCACCTAAAGGCGGGTCCT | 2306 | 2325 | -12.3 | 1229 |
| 444 | CCTCACCTAAAGGCGGGTCC | 2307 | 2326 | -14.4 | 1230 |
| 445 | CCCTCACCTAAAGGCGGGTC | 2308 | 2327 | -14.4 | 1231 |
| 446 | CCCCTCACCTAAAGGCGGGT | 2309 | 2328 | -14.3 | 1232 |
| 447 | TCAGGCGAATCTCATTCAGG | 58938 | 58957 | -22.2 | 1233 |
| 448 | ATCAGGCGAATCTCATTCAG | 58939 | 58958 | -23.7 | 1234 |
| 449 | TATCAGGCGAATCTCATTCA | 58940 | 58959 | -25.1 | 1235 |
| 450 | CTATCAGGCGAATCTCATTC | 58941 | 58960 | -26 | 1236 |
| 451 | ACTATCAGGCGAATCTCATT | 58942 | 58961 | -24.2 | 1237 |
| 452 | AACTATCAGGCGAATCTCAT | 58943 | 58962 | -24.3 | 1238 |
| 453 | AAACTATCAGGCGAATCTCA | 58944 | 58963 | -24.7 | 1239 |
| 454 | TAAACTATCAGGCGAATCTC | 58945 | 58964 | -25.1 | 1240 |
| 455 | GTAAACTATCAGGCGAATCT | 58946 | 58965 | -25.1 | 1241 |
| 456 | TCAATCTTTTGAACAGCTTT | 59008 | 59027 | -15.4 | 1242 |
| 457 | TCCCCCAGAAGAACTGTGGG | 62168 | 62187 | -21.1 | 1243 |
| 458 | GACATCGGAAGCTGGTCTTG | 64866 | 64885 | -25.4 | 1244 |
| 459 | TGACATCGGAAGCTGGTCTT | 64867 | 64886 | -23.6 | 1245 |
| 460 | TTGACATCGGAAGCTGGTCT | 64868 | 64887 | -23.9 | 1246 |
| 461 | TGTTGACATCGGAAGCTGGT | 64870 | 64889 | -25.1 | 1247 |
| 462 | ATGTTGACATCGGAAGCTGG | 64871 | 64890 | -25.8 | 1248 |
| 463 | CATGTTGACATCGGAAGCTG | 64872 | 64891 | -22.2 | 1249 |
| 464 | ACATGTTGACATCGGAAGCT | 64873 | 64892 | -22.2 | 1250 |
| 465 | TAAGGTGGAGCCTTTGTAAC | 64926 | 64945 | -23.8 | 1251 |
| 466 | AGACTCACCGTATGTAGTGT | 64951 | 64970 | -24.3 | 1252 |
| 467 | CCAGACTCACCGTATGTAGT | 64953 | 64972 | -25.6 | 1253 |
| 468 | TCCTACACTTACTTATTTGT | 65132 | 65151 | -20.2 | 1254 |
| 469 | CAAGCTATATCCGGAGATGG | 66513 | 66532 | -23.2 | 1255 |
| 470 | GCAAGCTATATCCGGAGATG | 66514 | 66533 | -25.5 | 1256 |
| 471 | TTGCAAGCTATATCCGGAGA | 66516 | 66535 | -26.7 | 1257 |
| 472 | CTTGCAAGCTATATCCGGAG | 66517 | 66536 | -27.6 | 1258 |
| 473 | TCTTGCAAGCTATATCCGGA | 66518 | 66537 | -26.7 | 1259 |
| 474 | CAGTACGACAAGGACCCAAA | 66598 | 66617 | -27.5 | 1260 |
| 475 | TACCTGATCGAGCAATGCCA | 68461 | 68480 | -25.7 | 1261 |
| 476 | AGTACCTGATCGAGCAATGC | 68463 | 68482 | -25.1 | 1262 |
| 477 | AAGTACCTGATCGAGCAATG | 68464 | 68483 | -25.1 | 1263 |
| 478 | ACAAGTACCTGATCGAGCAA | 68466 | 68485 | -25.8 | 1264 |
| 479 | CAAGCTGAATGTCTCATCAG | 92063 | 92082 | -18.6 | 1265 |
| 480 | CCAAGCTGAATGTCTCATCA | 92064 | 92083 | -18.7 | 1266 |
| 481 | GCCAAGCTGAATGTCTCATC | 92065 | 92084 | -18.2 | 1267 |
| 482 | AGTGCCGGACATCATAGTAA | 94396 | 94415 | -24.4 | 1268 |
| 483 | AAGTGCCGGACATCATAGTA | 94397 | 94416 | -24.1 | 1269 |
| 484 | AAAGTGCCGGACATCATAGT | 94398 | 94417 | -24.9 | 1270 |
| 485 | AGAGCTGGTTTTTTTCCAAA | 94415 | 94434 | -17.9 | 1271 |
| 486 | CAGAGCTGGTTTTTTTCCAA | 94416 | 94435 | -17.9 | 1272 |
| 487 | AACACCGCAGTCAGTAAGGC | 94618 | 94637 | -23.3 | 1273 |
| 488 | TAACACCGCAGTCAGTAAGG | 94619 | 94638 | -23.1 | 1274 |
| 489 | TTAACACCGCAGTCAGTAAG | 94620 | 94639 | -20 | 1275 |
| 490 | GTTAACACCGCAGTCAGTAA | 94621 | 94640 | -20.2 | 1276 |
| 491 | GGTTAACACCGCAGTCAGTA | 94622 | 94641 | -21 | 1277 |
| 492 | AGGTTAACACCGCAGTCAGT | 94623 | 94642 | -20.9 | 1278 |
| 493 | TAGGTTAACACCGCAGTCAG | 94624 | 94643 | -21.2 | 1279 |
| 494 | GTAGGTTAACACCGCAGTCA | 94625 | 94644 | -21.9 | 1280 |
| 495 | GGAGGTACGTTTCTCTGAGA | 94700 | 94719 | -19.6 | 1281 |
| 496 | ATACGGATGTGTTTTGGCCA | 94736 | 94755 | -22.8 | 1282 |
| 497 | TATACGGATGTGTTTTGGCC | 94737 | 94756 | -21.1 | 1283 |
| 498 | TTATACGGATGTGTTTTGGC | 94738 | 94757 | -18.4 | 1284 |
| 499 | ATTATACGGATGTGTTTTGG | 94739 | 94758 | -14.6 | 1285 |
| 500 | AGAGGATTATACGGATGTGT | 94744 | 94763 | -16.3 | 1286 |
| 501 | AAGAGGATTATACGGATGTG | 94745 | 94764 | -15.9 | 1287 |
| 502 | AAAGAGGATTATACGGATGT | 94746 | 94765 | -17.4 | 1288 |
| 503 | GCTCCGTAAAGATCACCTAG | 101099 | 101118 | -19.2 | 1289 |
| 504 | GGCTCCGTAAAGATCACCTA | 101100 | 101119 | -21.4 | 1290 |
| 505 | TGGCTCCGTAAAGATCACCT | 101101 | 101120 | -21.5 | 1291 |
| 506 | ATGGCTCCGTAAAGATCACC | 101102 | 101121 | -25.7 | 1292 |
| 507 | TATGGCTCCGTAAAGATCAC | 101103 | 101122 | -26.5 | 1293 |
| 508 | CTATGGCTCCGTAAAGATCA | 101104 | 101123 | -26.2 | 1294 |
| 509 | CCTATGGCTCCGTAAAGATC | 101105 | 101124 | -26.2 | 1295 |
| 510 | CGGTGCGAGTCAGTCTCACT | 101131 | 101150 | -16.2 | 1296 |
| 511 | ACGGTGCGAGTCAGTCTCAC | 101132 | 101151 | -20 | 1297 |
| 512 | TACGGTGCGAGTCAGTCTCA | 101133 | 101152 | -20.8 | 1298 |
| 513 | CTACGGTGCGAGTCAGTCTC | 101134 | 101153 | -22.4 | 1299 |
| 514 | ACTACGGTGCGAGTCAGTCT | 101135 | 101154 | -21.9 | 1300 |
| 515 | CCACTACGGTGCGAGTCAGT | 101137 | 101156 | -23.5 | 1301 |
| 516 | ACCACTACGGTGCGAGTCAG | 101138 | 101157 | -22.3 | 1302 |
| 517 | TACCACTACGGTGCGAGTCA | 101139 | 101158 | -14.1 | 1303 |
| 518 | CTACCACTACGGTGCGAGTC | 101140 | 101159 | -16.1 | 1304 |
| 519 | CCTACCACTACGGTGCGAGT | 101141 | 101160 | -17.7 | 1305 |
| 520 | CCCTACCACTACGGTGCGAG | 101142 | 101161 | -16.2 | 1306 |
| 521 | TCCCTACCACTACGGTGCGA | 101143 | 101162 | -15.5 | 1307 |
| 522 | TTCCCTACCACTACGGTGCG | 101144 | 101163 | -15.8 | 1308 |
| 523 | AGTATTCGCTGGACTAAGTC | 101171 | 101190 | -24 | 1309 |
| 524 | AAGTATTCGCTGGACTAAGT | 101172 | 101191 | -21.6 | 1310 |
| 525 | AAAGTATTCGCTGGACTAAG | 101173 | 101192 | -22.1 | 1311 |
| 526 | TAAAGTATTCGCTGGACTAA | 101174 | 101193 | -19.6 | 1312 |
| 527 | ATAAAGTATTCGCTGGACTA | 101175 | 101194 | -20 | 1313 |
| 528 | CATAAAGTATTCGCTGGACT | 101176 | 101195 | -19.4 | 1314 |
| 529 | GACATAAAGTATTCGCTGGA | 101178 | 101197 | -19.4 | 1315 |
| 530 | GGACATAAAGTATTCGCTGG | 101179 | 101198 | -21.1 | 1316 |
| 531 | GTAGCTCAGAGCAACGGAGA | 101209 | 101228 | -14.8 | 1317 |
| 532 | TTCCTCACCGTAATGACCAC | 101339 | 101358 | -25.6 | 1318 |
| 533 | GTTCCTCACCGTAATGACCA | 101340 | 101359 | -24.9 | 1319 |
| 534 | CGTTCCTCACCGTAATGACC | 101341 | 101360 | -26.2 | 1320 |
| 535 | TCGTTCCTCACCGTAATGAC | 101342 | 101361 | -24.5 | 1321 |
| 536 | CTCGTTCCTCACCGTAATGA | 101343 | 101362 | -23.4 | 1322 |
| 537 | GCTCGTTCCTCACCGTAATG | 101344 | 101363 | -24.7 | 1323 |
| 538 | GGCTCGTTCCTCACCGTAAT | 101345 | 101364 | -25.5 | 1324 |
| 539 | GGTACAAGAGCGGGCTCGTT | 101357 | 101376 | -25.4 | 1325 |
| 540 | GGGTACAAGAGCGGGCTCGT | 101358 | 101377 | -26.8 | 1326 |
| 541 | GGGGTACAAGAGCGGGCTCG | 101359 | 101378 | -29 | 1327 |
| 542 | GAAGCGTCTGATGCTGGCCC | 101540 | 101559 | -18.5 | 1328 |
| 543 | GGAAGCGTCTGATGCTGGCC | 101541 | 101560 | -20.5 | 1329 |
| 544 | AGGAAGCGTCTGATGCTGGC | 101542 | 101561 | -20.7 | 1330 |
| 545 | CAGGAAGCGTCTGATGCTGG | 101543 | 101562 | -19.2 | 1331 |
| 546 | CCAGGAAGCGTCTGATGCTG | 101544 | 101563 | -17.3 | 1332 |
| 547 | TCCAGGAAGCGTCTGATGCT | 101545 | 101564 | -21 | 1333 |
| 548 | TTCCAGGAAGCGTCTGATGC | 101546 | 101565 | -22.3 | 1334 |
| 549 | GGTTTCCAGGAAGCGTCTGA | 101549 | 101568 | -23.6 | 1335 |
| 550 | AGAGCCATCTTGCGGTGCCT | 101604 | 101623 | -26.5 | 1336 |
| 551 | AAGAGCCATCTTGCGGTGCC | 101605 | 101624 | -26.9 | 1337 |
| 552 | CACTGACCGGTCTGGCAGTC | 101715 | 101734 | -25.8 | 1338 |
| 553 | CCACTGACCGGTCTGGCAGT | 101716 | 101735 | -23.1 | 1339 |
| 554 | GGCCACTGACCGGTCTGGCA | 101718 | 101737 | -23.7 | 1340 |
| 555 | AAGCTTCCAATCTGGAAAGT | 101789 | 101808 | -18 | 1341 |
| 556 | ATTTTTTTCATGCGGCTTTC | 101831 | 101850 | -20.1 | 1342 |
| 557 | CATTTTTTTCATGCGGCTTT | 101832 | 101851 | -22.2 | 1343 |
| 558 | CCATTTTTTTCATGCGGCTT | 101833 | 101852 | -24.4 | 1344 |
| 559 | TCCATTTTTTTCATGCGGCT | 101834 | 101853 | -25.1 | 1345 |
| 560 | CTCCATTTTTTTCATGCGGC | 101835 | 101854 | -24.9 | 1346 |
| 561 | GGCCTTCACCCGTTCCTCCA | 101850 | 101869 | -25.4 | 1347 |
| 562 | AGGCCTTCACCCGTTCCTCC | 101851 | 101870 | -24.7 | 1348 |
| 563 | AGGGGCCACAGGCCTTCACC | 101860 | 101879 | -12.2 | 1349 |
| 564 | GAGGGGCCACAGGCCTTCAC | 101861 | 101880 | -12.8 | 1350 |
| 565 | GGAGGGGCCACAGGCCTTCA | 101862 | 101881 | -12.7 | 1351 |
| 566 | ACCCTTGTCAGACTCGCCTT | 102000 | 102019 | -26.4 | 1352 |
| 567 | AACCCTTGTCAGACTCGCCT | 102001 | 102020 | -26.6 | 1353 |
| 568 | ACCTGGGGGCAACAGGCTCC | 102187 | 102206 | -19.2 | 1354 |
| 569 | CACCTGGGGGCAACAGGCTC | 102188 | 102207 | -20 | 1355 |
| 570 | GGGGATATTCGCACCAGCCA | 102231 | 102250 | -21.2 | 1356 |
| 571 | AGGGGATATTCGCACCAGCC | 102232 | 102251 | -21.8 | 1357 |
| 572 | CAGGGGATATTCGCACCAGC | 102233 | 102252 | -23 | 1358 |
| 573 | ACAGGGGATATTCGCACCAG | 102234 | 102253 | -23 | 1359 |
| 574 | CACAGGGGATATTCGCACCA | 102235 | 102254 | -23.8 | 1360 |
| 575 | CTCCCAGGGCGCTATCTGAG | 102313 | 102332 | -27.6 | 1361 |
| 576 | TCTCCCAGGGCGCTATCTGA | 102314 | 102333 | -26.8 | 1362 |
| 577 | CAGGCTTCGTCGTCACTGTC | 102332 | 102351 | -25.1 | 1363 |
| 578 | GCAGGCTTCGTCGTCACTGT | 102333 | 102352 | -24.9 | 1364 |
| 579 | CGCAGGCTTCGTCGTCACTG | 102334 | 102353 | -25.5 | 1365 |
| 580 | AAGCGCAGGCTTCGTCGTCA | 102337 | 102356 | -27.5 | 1366 |
| 581 | GCTCCACTTCCAAGGACCCT | 102397 | 102416 | -20 | 1367 |
| 582 | AGCTCCACTTCCAAGGACCC | 102398 | 102417 | -17.2 | 1368 |
| 583 | GCCCGCCAGAAGTGAGCGGC | 103352 | 103371 | -22.1 | 1369 |
| 584 | AGCCCGCCAGAAGTGAGCGG | 103353 | 103372 | -16.3 | 1370 |
| 585 | GTCTGCGATAATACAGACAG | 124478 | 124497 | -16.3 | 1371 |
| 586 | TGTCTGCGATAATACAGACA | 124479 | 124498 | -14.4 | 1372 |
| 587 | TTATCCGTGTCTGCGATAAT | 124486 | 124505 | -17.9 | 1373 |
| 588 | TTTATCCGTGTCTGCGATAA | 124487 | 124506 | -19.1 | 1374 |
| 589 | ATTTATCCGTGTCTGCGATA | 124488 | 124507 | -19.8 | 1375 |
| 590 | AGACCAGGACATCCTGGCCT | 124560 | 124579 | -11.8 | 1376 |
| 591 | TGTAGTCTATCTTCAAGATG | 128760 | 128779 | -25.2 | 1377 |
| 592 | AGTACGACACCTAATTCTTT | 128844 | 128863 | -22.1 | 1378 |
| 593 | CAGTACGACACCTAATTCTT | 128845 | 128864 | -22.6 | 1379 |
| 594 | CCAGTACGACACCTAATTCT | 128846 | 128865 | -23.1 | 1380 |
| 595 | CCCAGTACGACACCTAATTC | 128847 | 128866 | -23.8 | 1381 |
| 596 | CCCCAGTACGACACCTAATT | 128848 | 128867 | -24.5 | 1382 |
| 597 | ACCCCAGTACGACACCTAAT | 128849 | 128868 | -26.2 | 1383 |
| 598 | CACCCCAGTACGACACCTAA | 128850 | 128869 | -26.4 | 1384 |
| 599 | TCACCCCAGTACGACACCTA | 128851 | 128870 | -27.2 | 1385 |
| 600 | CTCACCCCAGTACGACACCT | 128852 | 128871 | -26 | 1386 |
| 601 | AACTCACCCCAGTACGACAC | 128854 | 128873 | -26.3 | 1387 |
| 602 | GAACTCACCCCAGTACGACA | 128855 | 128874 | -28.3 | 1388 |
| 603 | GGTCGTTGGATTCAATCCTG | 137464 | 137483 | -20 | 1389 |
| 604 | AGGTCGTTGGATTCAATCCT | 137465 | 137484 | -18.6 | 1390 |
| 605 | CAGGTCGTTGGATTCAATCC | 137466 | 137485 | -20.9 | 1391 |
| 606 | GCAGGTCGTTGGATTCAATC | 137467 | 137486 | -20.8 | 1392 |
| 607 | GGCAGGTCGTTGGATTCAAT | 137468 | 137487 | -21.2 | 1393 |
| 608 | AGGCAGGTCGTTGGATTCAA | 137469 | 137488 | -21.4 | 1394 |
| 609 | AGAGGCAGGTCGTTGGATTC | 137471 | 137490 | -23.3 | 1395 |
| 610 | CAGAGAGCTTATTCCTTTCT | 137603 | 137622 | -16.7 | 1396 |
| 611 | ATTATGTCAAGTAAACCTAA | 137715 | 137734 | -20.7 | 1397 |
| 612 | AGTGTTCACGACAATCACAA | 137740 | 137759 | -25.1 | 1398 |
| 613 | AAGTGTTCACGACAATCACA | 137741 | 137760 | -25.5 | 1399 |
| 614 | TAAAGTGTTCACGACAATCA | 137743 | 137762 | -24.5 | 1400 |
| 615 | CTAAAGTGTTCACGACAATC | 137744 | 137763 | -25.5 | 1401 |
| 616 | CCTAAAGTGTTCACGACAAT | 137745 | 137764 | -23.1 | 1402 |
| 617 | AGCAGTTTCCTACTGGAATA | 137918 | 137937 | -13.1 | 1403 |
| 618 | ATGTTTTCTCCAGTTTGGGG | 137958 | 137977 | -19.4 | 1404 |
| 619 | TATGTTTTCTCCAGTTTGGG | 137959 | 137978 | -20 | 1405 |
| 620 | TTTATTGCACCAACAATCCA | 138224 | 138243 | -11.3 | 1406 |
| 621 | GTTTATTGCACCAACAATCC | 138225 | 138244 | -15.5 | 1407 |
| 622 | GGTTTATTGCACCAACAATC | 138226 | 138245 | -17.4 | 1408 |
| 623 | GGGTTTATTGCACCAACAAT | 138227 | 138246 | -14.3 | 1409 |
| 624 | CATACGGTTTCAGACTGTAC | 138301 | 138320 | -21.4 | 1410 |
| 625 | ACATACGGTTTCAGACTGTA | 138302 | 138321 | -20.8 | 1411 |
| 626 | AACATACGGTTTCAGACTGT | 138303 | 138322 | -21.7 | 1412 |
| 627 | ATAAAACATACGGTTTCAGA | 138307 | 138326 | -21.7 | 1413 |
| 628 | CCAACCGAAACACTCTTGAG | 138393 | 138412 | -10.3 | 1414 |
| 629 | ACCAACCGAAACACTCTTGA | 138394 | 138413 | -10.6 | 1415 |
| 630 | TACCAACCGAAACACTCTTG | 138395 | 138414 | -11 | 1416 |
| 631 | TTACCAACCGAAACACTCTT | 138396 | 138415 | -9.4 | 1417 |
| 632 | AACTTACCAACCGAAACACT | 138399 | 138418 | -8.4 | 1418 |
| 633 | GAACTTACCAACCGAAACAC | 138400 | 138419 | -11.1 | 1419 |
| 634 | AGAACTTACCAACCGAAACA | 138401 | 138420 | -9.4 | 1420 |
| 635 | AATGATAATATAAAAATTTA | 138576 | 138595 | -6.9 | 1421 |
| 636 | AAATGATAATATAAAAATTT | 138577 | 138596 | -3.8 | 1422 |
| 637 | GAAATGATAATATAAAAATT | 138578 | 138597 | -6.9 | 1423 |
| 638 | AAAAGTCTTTTACTTTACCC | 138785 | 138804 | -19.2 | 1424 |
| 639 | TTTAAAAGTCTTTTACTTTA | 138788 | 138807 | -11.8 | 1425 |
| 640 | ATGACCAATATTTAAAAGTC | 138798 | 138817 | -17.6 | 1426 |
| 641 | GCAAAGTGCTAAAGATGTTT | 138847 | 138866 | -18.9 | 1427 |
| 642 | TGCAAAGTGCTAAAGATGTT | 138848 | 138867 | -18.9 | 1428 |
| 643 | GAACTGGAATTAATTCATAA | 138910 | 138929 | -19.3 | 1429 |
| 644 | AAAACTTAATGCACTCATCT | 139056 | 139075 | -19.6 | 1430 |
| 645 | CAAAACTTAATGCACTCATC | 139057 | 139076 | -20.5 | 1431 |
| 646 | AGAATGAACATTTCAATTTT | 139108 | 139127 | -16.2 | 1432 |
| 647 | AAGAATGAACATTTCAATTT | 139109 | 139128 | -15.4 | 1433 |
| 648 | TGTCCCCTATATGGGTCTAA | 139469 | 139488 | -20.4 | 1434 |
| 649 | GTGTCCCCTATATGGGTCTA | 139470 | 139489 | -23 | 1435 |
| 650 | AGTGTCCCCTATATGGGTCT | 139471 | 139490 | -22.6 | 1436 |
| 651 | GGCATTTTTCCAAGAGTGAG | 139595 | 139614 | -24.3 | 1437 |
| 652 | ATTTAAAGGATTATAAAAGA | 139732 | 139751 | -15.8 | 1438 |
| 653 | TGTGAGCGGTGGATCTCAAC | 139833 | 139852 | -22.5 | 1439 |
| 654 | GTGTGAGCGGTGGATCTCAA | 139834 | 139853 | -25.5 | 1440 |
| 655 | CGTGTGAGCGGTGGATCTCA | 139835 | 139854 | -26.6 | 1441 |
| 656 | GCGTGTGAGCGGTGGATCTC | 139836 | 139855 | -29.3 | 1442 |
| 657 | GGCGTGTGAGCGGTGGATCT | 139837 | 139856 | -31.4 | 1443 |
| 658 | ACGGCGTGTGAGCGGTGGAT | 139839 | 139858 | -34.5 | 1444 |
| 659 | TACGGCGTGTGAGCGGTGGA | 139840 | 139859 | -33.1 | 1445 |
| 660 | GTACGGCGTGTGAGCGGTGG | 139841 | 139860 | -35 | 1446 |
| 661 | TGTACGGCGTGTGAGCGGTG | 139842 | 139861 | -32.9 | 1447 |
| 662 | GTGTACGGCGTGTGAGCGGT | 139843 | 139862 | -34.2 | 1448 |
| 663 | TGGTGTACGGCGTGTGAGCG | 139845 | 139864 | -34.3 | 1449 |
| 664 | GTGGTGTACGGCGTGTGAGC | 139846 | 139865 | -33.6 | 1450 |
| 665 | GGTGGTGTACGGCGTGTGAG | 139847 | 139866 | -31.7 | 1451 |
| 666 | TGGGTGGTGTACGGCGTGTG | 139849 | 139868 | -34.2 | 1452 |
| 667 | CTGGGTGGTGTACGGCGTGT | 139850 | 139869 | -31.9 | 1453 |
| 668 | CACTGGGTGGTGTACGGCGT | 139852 | 139871 | -29.5 | 1454 |
| 669 | CCTCTGCGGCTAAGCCAGAA | 139878 | 139897 | -20.1 | 1455 |
| 670 | GCCTCTGCGGCTAAGCCAGA | 139879 | 139898 | -24 | 1456 |
| 671 | TGCCTCTGCGGCTAAGCCAG | 139880 | 139899 | -22.6 | 1457 |
| 672 | TTTAAAAAAAATTGTTTTAT | 139944 | 139963 | -6.8 | 1458 |
| 673 | TTTTAAAAAAAATTGTTTTA | 139945 | 139964 | -6 | 1459 |
| 674 | TGAAGAAACCCTAAAGGTGG | 139997 | 140016 | -22.5 | 1460 |
| 675 | TTAAAAGTTGAAGAAACCCT | 140005 | 140024 | -18.5 | 1461 |
| 676 | TTTACAGACTTCTGCTCTGT | 140088 | 140107 | -13.4 | 1462 |
| 677 | ATTTACAGACTTCTGCTCTG | 140089 | 140108 | -14.7 | 1463 |
| 678 | CCAATTTATTAAAAATAAAA | 140144 | 140163 | -10.3 | 1464 |
| 679 | ACCAATTTATTAAAAATAAA | 140145 | 140164 | -11.6 | 1465 |
| 680 | TACACAATTACCTTTACATT | 140175 | 140194 | -18.5 | 1466 |
| 681 | CGTACACAATTACCTTTACA | 140177 | 140196 | -19.6 | 1467 |
| 682 | CATTTTAAATTTTCATTGTC | 140207 | 140226 | -8.3 | 1468 |
| 683 | GATAAAAAATAAAATACTTT | 140253 | 140272 | -10.3 | 1469 |
| 684 | TGATAAAAAATAAAATACTT | 140254 | 140273 | -12 | 1470 |
| 685 | TTGATAAAAAATAAAATACT | 140255 | 140274 | -11.8 | 1471 |
| 686 | ATTGATAAAAAATAAAATAC | 140256 | 140275 | -11.1 | 1472 |
| 687 | ACTGATTGATAAAAAATAAA | 140260 | 140279 | -12.6 | 1473 |
| 688 | AAACAGCACACTTCGAAAAA | 140312 | 140331 | -17.4 | 1474 |
| 689 | TTACTTTCATTAAAAAACAG | 140326 | 140345 | -20.2 | 1475 |
| 690 | TGTGTAAACGGCAGTTCCAT | 140366 | 140385 | -27.7 | 1476 |
| 691 | ACAACGGTTTAGTATCATTT | 140457 | 140476 | -17.1 | 1477 |
| 692 | AGAGCCCAAACAACGGTTTA | 140466 | 140485 | -16.8 | 1478 |
| 693 | ATTAGCGGAAAAATCCAGAC | 140603 | 140622 | -22.9 | 1479 |
| 694 | TATTAGCGGAAAAATCCAGA | 140604 | 140623 | -20.3 | 1480 |
| 695 | AAGTACATATTAGCGGAAAA | 140611 | 140630 | -15.7 | 1481 |
| 696 | AAAGTACATATTAGCGGAAA | 140612 | 140631 | -15.5 | 1482 |
| 697 | TTCTCTAAAGTACATATTAG | 140618 | 140637 | -10.3 | 1483 |
| 698 | ATTCTCTAAAGTACATATTA | 140619 | 140638 | -8.5 | 1484 |
| 699 | AATATTCTCTAAAGTACATA | 140622 | 140641 | -8.6 | 1485 |
| 700 | ATGAACAAAATATTCTCTAA | 140630 | 140649 | -14.8 | 1486 |
| 701 | CATGAACAAAATATTCTCTA | 140631 | 140650 | -16.3 | 1487 |
| 702 | AGTATGCATGAACAAAATAT | 140637 | 140656 | -13.9 | 1488 |
| 703 | AATTATATTAAAATACCCTC | 140732 | 140751 | -16 | 1489 |
| 704 | AAAATTATATTAAAATACCC | 140734 | 140753 | -13.5 | 1490 |
| 705 | AAAAATTATATTAAAATACC | 140735 | 140754 | -12.4 | 1491 |
| 706 | TCAAGATATATCGTTCATCA | 140805 | 140824 | -20.8 | 1492 |
| 707 | TTCAAGATATATCGTTCATC | 140806 | 140825 | -20.5 | 1493 |
| 708 | TTTCAAGATATATCGTTCAT | 140807 | 140826 | -19 | 1494 |

TABLE 5
Example antisense oligonucleotide modulators to downregulate FNIP2

| | | Target start | Target stop | |
|---|---|---|---|---|
| | | site with | site with | |
| | | reference to | reference to | |
| | | SEQ ID | SEQ ID | SEQ ID |
| GI ID# | Sequence | NO: 1 | NO: 1 | NO |
| GiTx-66 | GTGGATAGCGGAAATGGTGG | 3939 | 3958 | 804 |
| GiTx-67 | GGTGTACGGCGTGTGAGCGG | 139844 | 139863 | 1202 |
| GiTx-68 | CCTGTCTACTCCGGTGTGTT | 39376 | 39395 | 912 |
| GiTx-69 | TTGTGTTGGGACCGTGACCC | 23023 | 23042 | 865 |
| GiTx-70 | CTCTACTCTCACTGGCTTGT | 64249 | 64268 | 975 |
| GiTx-71 | CCGCTGCGACTGAGTAACTC | 2066 | 2085 | 787 |
| GiTx-72 | TCCTCACCGTAATGACCACA | 101338 | 101357 | 1083 |
| GiTx-73 | GTTGACATCGGAAGCTGGTC | 64869 | 64888 | 978 |
| GiTx-74 | ACTGACCGGTCTGGCAGTCT | 101714 | 101733 | 1085 |

TABLE 6
Example antisense oligonucleotide modulators to upregulate FNIP2

| | | Target start | Target stop | |
|---|---|---|---|---|
| | | site with | site with | |
| | | reference to | reference to | |
| | | SEQ ID | SEQ ID | SEQ ID |
| GI ID# | Sequence | NO: 1 | NO: 1 | NO |
| GiTx-75 | ATGTGTAAACGGCAGTTCCA | 140367 | 140386 | 1206 |
| GiTx-76 | GTGTAAACGGCAGTTCCATG | 140365 | 140384 | 1205 |
| GiTx-77 | ACAAAACTTAATGCACTCAT | 139058 | 139077 | 1200 |
| GiTx-78 | GATAAAACATACGGTTTCAG | 138308 | 138327 | 1199 |
| GiTx-79 | AAACATACGGTTTCAGACTG | 138304 | 138323 | 1198 |
| GiTx-80 | AAAGTGTTCACGACAATCAC | 137742 | 137761 | 1197 |

TABLE 7
Human iPSC Lines for Evaluating Therapies
for Neurodegenerative Disease such as ALS

| Name | Type | ALS Subtype/Mutation |
|---|---|---|
| GI-iPSC 1 | Healthy | NA |
| GI-iPSC 2 | Isogenic | TARDBP (G298S) |
| GI-iPSC 3 | Isogenic | SOD1 (L144F) |
| GI-iPSC 4 | Patient | Sporadic |
| GI-iPSC 5 | Patient | C9ORF72 |
| GI-iPSC 6 | Patient | TARDBP |
| GI-iPSC 7 | Patient | Sporadic |
| GI-iPSC 8 | Patient | C9ORF72 |
| GI-iPSC 9 | Patient | SOD1 (A4V) |
| GI-iPSC 10 | Healthy | NA |
| GI-iPSC 11 | Healthy | NA |

TABLE 8
Normalized Survival Index (NSI) of Human
ALS iPSC-derived Motor Neurons

| | | Day 28 | | Day 31 | |
|---|---|---|---|---|---|
| Cell line | Treatment | NSI | STDEV | NSI | STDEV |
| BJ-iPS | si-NT | 1.00 | 0.06 | 1.07 | 0.09 |
| | si-FLCN | | | 1.00 | 0.07 |
| BJ-SOD1 (L144F) | si-NT | 0.96 | 0.05 | 0.53 | 0.02 |
| | si-FLCN | | | 0.89 | 0.02 |
| BJ-TDP43 (G298S) | si-NT | 0.91 | 0.03 | 0.48 | 0.08 |
| | si-FLCN | | | 0.73 | 0.05 |
| CS14isALS-Tn16 | si-NT | 0.93 | 0.05 | 0.48 | 0.06 |
| | si-FLCN | | | 0.96 | 0.10 |

TABLE 9
Phosphorylated TDP-43 (pTDP43) levels
in Human ALS iPSC-derived Motor Neurons

| | | Day 28 | | Day 31 | |
|---|---|---|---|---|---|
| Cell line | Treatment | pTDP43 | STDEV | pTDP43 | STDEV |
| BJ-iPS | si-NT | 1.00 | 0.03 | 1.05 | 0.02 |
| | si-FLCN | | | 0.97 | 0.01 |
| BJ-SOD1 (L144F) | si-NT | 8.51 | 0.87 | 8.25 | 0.17 |
| | si-FLCN | | | 4.68 | 0.15 |
| BJ-TDP43 (G298S) | si-NT | 8.04 | 0.65 | 7.58 | 0.40 |
| | si-FLCN | | | 4.70 | 0.54 |
| CS14isALS-Tn16 | si-NT | 9.74 | 0.62 | 9.50 | 0.27 |
| | si-FLCN | | | 5.58 | 0.43 |

TABLE 10
miRNA modulators targeting SEQ ID NO: 11

| | | | | Example seed |
|---|---|---|---|---|
| | | | | location with |
| | | | | reference to |
| | | | Target | SEQ ID |
| No | Name | miRNA Sequence | Score | NO: 11 |
| 1 | hsa-miR-32-5p | UAUUGCACAUUACUAAGUUGCA | 100 | 156175 |
| 2 | hsa-miR-92a-3p | UAUUGCACUUGUCCCGGCCUGU | 100 | 156175 |
| 3 | hsa-miR-92b-3p | UAUUGCACUCGUCCCGGCCUCC | 100 | 156175 |
| 4 | hsa-miR-641 | AAAGACAUAGGAUAGAGUCACCUC | 100 | 157002 |
| 5 | hsa-miR-363-3p | AAUUGCACGGUAUCCAUCUGUA | 100 | 156175 |
| 6 | hsa-miR-3617-5p | AAAGACAUAGUUGCAAGAUGGG | 100 | 157002 |
| 7 | hsa-miR-4495 | AAUGUAAACAGGCUUUUUGCU | 99 | 155144 |
| 8 | hsa-miR-25-3p | CAUUGCACUUGUCUCGGUCUGA | 99 | 156175 |
| 9 | hsa-miR-367-3p | AAUUGCACUUUAGCAAUGGUGA | 99 | 156175 |
| 10 | hsa-miR-12129 | GAUGUACUGAACUGGGUCAGAC | 98 | 154889 |
| 11 | hsa-miR-186-5p | CAAAGAAUUCUCCUUUUGGGCU | 97 | 154403 |
| 12 | hsa-miR-1272 | GAUGAUGAUGGCAGCAAAUUCUGAAA | 97 | 155643 |
| 13 | hsa-miR-4773 | CAGAACAGGAGCAUAGAAAGGC | 96 | 155123 |
| 14 | hsa-miR-6799-5p | GGGGAGGUGUGCAGGGCUGG | 96 | 156211 |
| 15 | hsa-miR-190a-3p | CUAUAUAUCAAACAUAUUCCU | 96 | 154959 |
| 16 | hsa-miR-5680 | GAGAAAUGCUGGACUAAUCUGC | 96 | 154598 |
| 17 | hsa-miR-4325 | UUGCACUUGUCUCAGUGA | 95 | 156174 |
| 18 | hsa-miR-300 | UAUACAAGGGCAGACUCUCUCU | 94 | 154465 |
| 19 | hsa-miR-374b-5p | AUAUAAUACAACCUGCUAAGUG | 94 | 154835 |
| 20 | hsa-miR-374a-5p | UUAUAAUACAACCUGAUAAGUG | 94 | 154835 |
| 21 | hsa-miR-539-5p | GGAGAAAUUAUCCUUGGUGUGU | 94 | 154801 |
| 22 | hsa-miR-4500 | UGAGGUAGUAGUUUCUU | 93 | 155535 |
| 23 | hsa-miR-580-3p | UUGAGAAUGAUGAAUCAUUAGG | 93 | 154803 |
| 24 | hsa-miR-1199-5p | CCUGAGCCCGGGCCGCGCAG | 93 | 154689 |
| 25 | hsa-miR-369-3p | AAUAAUACAUGGUUGAUCUUU | 93 | 157235 |
| 26 | hsa-miR-7-2-3p | CAACAAAUCCCAGUCUACCUAA | 93 | 154761 |
| 27 | hsa-miR-7-1-3p | CAACAAAUCACAGUCUGCCAUA | 93 | 154761 |
| 28 | hsa-miR-6751-3p | ACUGAGCCUCUCUCUCUCCAG | 93 | 154689 |
| 29 | hsa-miR-4303 | UUCUGAGCUGAGGACAG | 92 | 154690 |
| 30 | hsa-miR-218-1-3p | AUGGUUCCGUCAAGCACCAUGG | 92 | 155470 |
| 31 | hsa-miR-381-3p | UAUACAAGGGCAAGCUCUCUGU | 92 | 154465 |
| 32 | hsa-miR-6832-3p | ACCCUUUUUCUCUUUCCCAG | 92 | 156909 |
| 33 | hsa-let-7c-5p | UGAGGUAGUAGGUUGUAUGGUU | 91 | 155535 |
| 34 | hsa-let-7e-5p | UGAGGUAGGAGGUUGUAUAGUU | 91 | 155535 |
| 35 | hsa-let-7b-5p | UGAGGUAGUAGGUUGUGUGGUU | 91 | 155535 |
| 36 | hsa-miR-510-5p | UACUCAGGAGAGUGGCAAUCAC | 91 | 155936 |
| 37 | hsa-let-7f-5p | UGAGGUAGUAGAUUGUAUAGUU | 91 | 155535 |
| 38 | hsa-let-7i-5p | UGAGGUAGUAGUUUGUGCUGUU | 91 | 155535 |
| 39 | hsa-let-7g-5p | UGAGGUAGUAGUUUGUACAGUU | 91 | 155535 |
| 40 | hsa-let-7a-5p | UGAGGUAGUAGGUUGUAUAGUU | 91 | 155535 |
| 41 | hsa-miR-98-5p | UGAGGUAGUAAGUUGUAUUGUU | 91 | 155535 |
| 42 | hsa-miR-4458 | AGAGGUAGGUGUGGAAGAA | 90 | 155535 |
| 43 | hsa-miR-6719-3p | UCUGACAUCAGUGAUUCUCCUG | 90 | 154480 |
| 44 | hsa-let-7d-5p | AGAGGUAGUAGGUUGCAUAGUU | 90 | 155535 |
| 45 | hsa-miR-3133 | UAAAGAACUCUUAAAACCCAAU | 90 | 155223 |
| 46 | hsa-miR-95-5p | UCAAUAAAUGUCUGUUGAAUU | 90 | 156440 |
| 47 | hsa-miR-6715a-3p | CCAAACCAGUCGUGCCUGUGG | 90 | 156967 |
| 48 | hsa-miR-590-3p | UAAUUUUAUGUAUAAGCUAGU | 90 | 155173 |
| 49 | hsa-miR-4728-5p | UGGGAGGGGAGAGGCAGCAAGCA | 89 | 155372 |
| 50 | hsa-miR-323a-3p | CACAUUACACGGUCGACCUCU | 89 | 155488 |
| 51 | hsa-miR-5580-3p | CACAUAUGAAGUGAGCCAGCAC | 89 | 154892 |
| 52 | hsa-miR-4310 | GCAGCAUUCAUGUCCC | 89 | 154989 |
| 53 | hsa-miR-579-3p | UUCAUUUGGUAUAAACCGCGAUU | 88 | 154536 |
| 54 | hsa-miR-1-5p | ACAUACUUCUUUAUAUGCCCAU | 88 | 155114 |
| 55 | hsa-miR-411-3p | UAUGUAACACGGUCCACUAACC | 88 | 155145 |
| 56 | hsa-miR-589-3p | UCAGAACAAAUGCCGGUUCCCAGA | 88 | 157151 |
| 57 | hsa-miR-7157-5p | UCAGCAUUCAUUGGCACCAGAGA | 88 | 154989 |
| 58 | hsa-miR-664b-3p | UUCAUUUGCCUCCCAGCCUACA | 88 | 154536 |
| 59 | hsa-miR-4775 | UUAAUUUUUUGUUUCGGUCACU | 88 | 154542 |
| 60 | hsa-miR-7162-3p | UCUGAGGUGGAACAGCAGC | 88 | 155537 |
| 61 | hsa-miR-7152-5p | UUUCCUGUCCUCCAACCAGACC | 88 | 156898 |
| 62 | hsa-miR-7106-5p | UGGGAGGAGGGGAUCUUGGG | 88 | 156211 |
| 63 | hsa-miR-379-3p | UAUGUAACAUGGUCCACUAACU | 88 | 155145 |
| 64 | hsa-miR-499a-5p | UUAAGACUUGCAGUGAUGUUU | 88 | 157004 |
| 65 | hsa-miR-3664-3p | UCUCAGGAGUAAAGACAGAGUU | 88 | 156647 |
| 66 | hsa-miR-188-5p | CAUCCCUUGCAUGGUGGAGGG | 87 | 156911 |
| 67 | hsa-miR-6729-3p | UCAUCCCCCUCGCCCUCUCAG | 87 | 157086 |
| 68 | hsa-miR-196a-5p | UAGGUAGUUUCAUGUUGUUGGG | 87 | 155534 |
| 69 | hsa-miR-196b-5p | UAGGUAGUUUCCUGUUGUUGGG | 87 | 155534 |
| 70 | hsa-miR-137-3p | UUAUUGCUUAAGAAUACGCGUAG | 87 | 157034 |
| 71 | hsa-miR-6785-5p | UGGGAGGGCGUGGAUGAUGGUG | 87 | 155372 |
| 72 | hsa-miR-5011-5p | UAUAUAUACAGCCAUGCACUC | 87 | 154959 |
| 73 | hsa-miR-4482-3p | UUUCUAUUUCUCAGUGGGGCUC | 87 | 154923 |
| 74 | hsa-miR-493-5p | UUGUACAUGGUAGGCUUUCAUU | 87 | 157186 |
| 75 | hsa-miR-3613-3p | ACAAAAAAAAAAGCCCAACCCUUC | 86 | 154498 |
| 76 | hsa-miR-6758-3p | ACUCAUUCUCCUCUGUCCAG | 86 | 154431 |
| 77 | hsa-miR-374c-5p | AUAAUACAACCUGCUAAGUGCU | 85 | 157234 |
| 78 | hsa-miR-208a-3p | AUAAGACGAGCAAAAAGCUUGU | 85 | 157004 |
| 79 | hsa-miR-655-3p | AUAAUACAUGGUUAACCUCUUU | 85 | 157234 |
| 80 | hsa-miR-208b-3p | AUAAGACGAACAAAAGGUUUGU | 85 | 157004 |
| 81 | hsa-miR-3658 | UUUAAGAAAACACCAUGGAGAU | 85 | 155341 |
| 82 | hsa-miR-6883-5p | AGGGAGGGUGUGGUAUGGAUGU | 84 | 155372 |
| 83 | hsa-miR-4666a-3p | CAUACAAUCUGACAUGUAUUU | 84 | 154464 |
| 84 | hsa-miR-3189-3p | CCCUUGGGUCUGAUGGGGUAG | 84 | 154370 |
| 85 | hsa-miR-548o-3p | CCAAAACUGCAGUUACUUUUGC | 84 | 154768 |
| 86 | hsa-miR-149-3p | AGGGAGGGACGGGGGCUGUGC | 84 | 155372 |
| 87 | hsa-miR-1323 | UCAAAACUGAGGGGCAUUUUCU | 84 | 154768 |
| 88 | hsa-miR-6866-3p | GAUCCCUUUAUCUGUCCUCUAG | 83 | 156911 |
| 89 | hsa-miR-3177-5p | UGUGUACACACGUGCCAGGCGCU | 82 | 157226 |
| 90 | hsa-miR-548aw | GUGCAAAAGUCAUCACGGUU | 82 | 154770 |
| 91 | hsa-miR-659-3p | CUUGGUUCAGGGAGGGUCCCCA | 82 | 155471 |
| 92 | hsa-miR-4280 | GAGUGUAGUUCUGAGCAGAGC | 82 | 155326 |
| 93 | hsa-miR-6780a-5p | UUGGGAGGGAAGACAGCUGGAGA | 81 | 156211 |
| 94 | hsa-miR-3119 | UGGCUUUUAACUUUGAUGGC | 81 | 154575 |
| 95 | hsa-miR-1245b-3p | UCAGAUGAUCUAAAGGCCUAUA | 80 | 154426 |
| 96 | hsa-miR-7703 | UUGCACUCUGGCCUUCUCCCAGG | 80 | 156173 |
| 97 | hsa-miR-5692b | AAUAAUAUCACAGUAGGUGU | 80 | 154613 |
| 98 | hsa-miR-5692c | AAUAAUAUCACAGUAGGUGUAC | 80 | 154613 |
| 99 | hsa-miR-211-5p | UUCCCUUUGUCAUCCUUCGCCU | 80 | 156910 |
| 100 | hsa-miR-204-5p | UUCCCUUUGUCAUCCUAUGCCU | 80 | 156910 |
| 101 | hsa-miR-4682 | UCUGAGUUCCUGGAGCCUGGUCU | 79 | 154844 |
| 102 | hsa-miR-219b-3p | AGAAUUGCGUUUGGACAAUCAGU | 78 | 154774 |
| 103 | hsa-miR-380-3p | UAUGUAAUAUGGUCCACAUCUU | 78 | 155145 |
| 104 | hsa-miR-944 | AAAUUAUUGUACAUCGGAUGAG | 78 | 154555 |
| 105 | hsa-miR-3120-3p | CACAGCAAGUGUAGACAGGCA | 78 | 155729 |
| 106 | hsa-miR-6507-5p | GAAGAAUAGGAGGGACUUUGU | 77 | 155221 |
| 107 | hsa-miR-541-5p | AAAGGAUUCUGCUGUCGGUCCCACU | 77 | 156633 |
| 108 | hsa-miR-1260b | AUCCCACCACUGCCACCAU | 77 | 154350 |
| 109 | hsa-miR-1260a | AUCCCACCUCUGCCACCA | 77 | 154350 |
| 110 | hsa-miR-98-3p | CUAUACAACUUACUACUUUCCC | 76 | 154465 |
| 111 | hsa-let-7b-3p | CUAUACAACCUACUGCCUUCCC | 76 | 154465 |
| 112 | hsa-let-7f-1-3p | CUAUACAAUCUAUUGCCUUCCC | 76 | 154465 |
| 113 | hsa-let-7a-3p | CUAUACAAUCUACUGUCUUUC | 76 | 154465 |
| 114 | hsa-miR-30c-1-3p | CUGGGAGAGGGUUGUUUACUCC | 75 | 155942 |
| 115 | hsa-miR-6788-5p | CUGGGAGAAGAGUGGUGAAGA | 75 | 155942 |
| 116 | hsa-miR-607 | GUUCAAAUCCAGAUCUAUAAC | 75 | 154569 |
| 117 | hsa-miR-30b-3p | CUGGGAGGUGGAUGUUUACUUC | 75 | 156211 |
| 118 | hsa-miR-664a-3p | UAUUCAUUUAUCCCCAGCCUACA | 75 | 154608 |
| 119 | hsa-miR-6779-5p | CUGGGAGGGGCUGGGUUUGGC | 75 | 156211 |
| 120 | hsa-miR-3689a-3p | CUGGGAGGUGUGAUAUCGUGGU | 75 | 156211 |
| 121 | hsa-miR-1273h-5p | CUGGGAGGUCAAGGCUGCAGU | 75 | 156211 |
| 122 | hsa-miR-3689b-3p | CUGGGAGGUGUGAUAUUGUGGU | 75 | 156211 |
| 123 | hsa-miR-548aj-3p | UAAAAACUGCAAUUACUUUUA | 75 | 154711 |
| 124 | hsa-miR-3689c | CUGGGAGGUGUGAUAUUGUGGU | 75 | 156211 |
| 125 | hsa-miR-30c-2-3p | CUGGGAGAAGGCUGUUUACUCU | 75 | 155942 |
| 126 | hsa-miR-340-5p | UUAUAAAGCAAUGAGACUGAUU | 75 | 155095 |
| 127 | hsa-miR-6736-3p | UCAGCUCCUCUCUACCCACAG | 75 | 155286 |
| 128 | hsa-miR-548x-3p | UAAAAACUGCAAUUACUUUC | 75 | 154711 |
| 129 | hsa-miR-494-3p | UGAAACAUACACGGGAAACCUC | 74 | 155021 |
| 130 | hsa-miR-12119 | UUCUGAGGGGACGGUAGAUUUGGGG | 74 | 154691 |
| 131 | hsa-miR-212-5p | ACCUUGGCUCUAGACUGCUUACU | 73 | 154370 |
| 132 | hsa-miR-548c-3p | CAAAAAUCUCAAUUACUUUUGC | 73 | 154526 |
| 133 | hsa-miR-553 | AAAACGGUGAGAUUUUGUUUU | 73 | 156524 |
| 134 | hsa-miR-3674 | AUUGUAGAACCUAAGAUUGGCC | 73 | 154601 |
| 135 | hsa-miR-548ah-3p | CAAAAACUGCAGUUACUUUUGC | 72 | 154711 |
| 136 | hsa-miR-548am-3p | CAAAAACUGCAGUUACUUUUGU | 72 | 154711 |
| 137 | hsa-miR-548aq-3p | CAAAAACUGCAAUUACUUUUGC | 72 | 154711 |
| 138 | hsa-miR-1224-5p | GUGAGGACUCGGGAGGUGG | 72 | 155317 |
| 139 | hsa-miR-548j-3p | CAAAAACUGCAUUACUUUUGC | 72 | 154711 |
| 140 | hsa-miR-548ae-3p | CAAAAACUGCAAUUACUUUCA | 72 | 154711 |
| 141 | hsa-miR-337-3p | CUCCUAUAUGAUGCCUUUCUUC | 72 | 156639 |
| 142 | hsa-miR-3923 | AACUAGUAAUGUUGGAUUAGGG | 72 | 154974 |
| 143 | hsa-miR-1245a | AAGUGAUCUAAAGGCCUACAU | 71 | 154634 |
| 144 | hsa-miR-6807-5p | GUGAGCCAGUGGAAUGGAGAGG | 70 | 154688 |
| 145 | hsa-miR-9898 | UACUUACCUGUCCCCUACCCCA | 70 | 154811 |
| 146 | hsa-miR-3529-3p | AACAACAAAAUCACUAGUCUUCCA | 70 | 155851 |
| 147 | hsa-miR-655-5p | AGAGGUUAUCCGUGUUAUGUUC | 70 | 157244 |
| 148 | hsa-miR-23b-3p | AUCACAUUGCCAGGGAUUACCAC | 69 | 156807 |
| 149 | hsa-miR-23a-3p | AUCACAUUGCCAGGGAUUUCC | 69 | 156807 |
| 150 | hsa-miR-10523-5p | GACAAUGAUGAGAAGACCUGAGGA | 69 | 154463 |
| 151 | hsa-miR-8079 | CAGUGAUCGUCUCUGCUGGC | 69 | 154634 |
| 152 | hsa-miR-23c | AUCACAUUGCCAGUGAUUACCC | 69 | 156807 |
| 153 | hsa-miR-2052 | UGUUUUGAUAACAGUAAUGU | 68 | 154779 |
| 154 | hsa-miR-12123 | UUAUUCAUUCACAAAAGCUUUA | 68 | 154609 |
| 155 | hsa-miR-4764-5p | UGGAUGUGGAAGGAGUUAUCU | 68 | 155718 |
| 156 | hsa-miR-202-3p | AGAGGUAUAGGGCAUGGGAA | 67 | 155536 |
| 157 | hsa-miR-3202 | UGGAAGGGAGAAGAGCUUUAAU | 67 | 155376 |
| 158 | hsa-miR-223-5p | CGUGUAUUUGACAAGCUGAGUU | 66 | 157278 |
| 159 | hsa-miR-4672 | UUACACAGCUGGACAGAGGCA | 66 | 154474 |
| 160 | hsa-miR-502-5p | AUCCUUGCUAUCUGGGUGCUA | 66 | 154371 |
| 161 | hsa-miR-5590-3p | AAUAAAGUUCAUGUAUGGCAA | 65 | 155094 |
| 162 | hsa-miR-5584-5p | CAGGGAAAUGGGAAGAACUAGA | 65 | 154409 |
| 163 | hsa-miR-142-5p | CAUAAAGUAGAAAGCACUACU | 65 | 155094 |
| 164 | hsa-miR-580-5p | UAAUGAUUCAUCAGACUCAGAU | 65 | 156626 |
| 165 | hsa-miR-6738-3p | CUUCUGCCUGCAUUCUACUCCCAG | 65 | 154918 |
| 166 | hsa-miR-3192-5p | UCUGGGAGGUUGUAGCAGUGGAA | 65 | 156212 |
| 167 | hsa-miR-1277-5p | AAAUAUAUAUAUAUAUGUACGUAU | 64 | 154963 |
| 168 | hsa-miR-196a-3p | CGGCAACAAGAAACUGCCUGAG | 64 | 155420 |
| 169 | hsa-miR-4727-5p | AUCUGCCAGCUUCCACAGUGG | 63 | 156069 |
| 170 | hsa-miR-31-3p | UGCUAUGCCAACAUAUUGCCAU | 63 | 154457 |
| 171 | hsa-miR-5696 | CUCAUUUAAGUAGUCUGAUGCC | 63 | 154537 |
| 172 | hsa-miR-411-5p | UAGUAGACCGUAUAGCGUACG | 63 | 155531 |
| 173 | hsa-miR-329-5p | GAGGUUUUCUGGGUUUCUGUUUC | 62 | 154749 |
| 174 | hsa-miR-6715b-3p | CUCAAACCGGCUGUGCCUGUGG | 62 | 156968 |
| 175 | hsa-miR-3606-5p | UUAGUGAAGGCUAUUUUAAUU | 62 | 155152 |
| 176 | hsa-miR-5692a | CAAAUAAUACCACAGUGGGUGU | 62 | 154758 |
| 177 | hsa-miR-6731-5p | UGGGAGAGCAGGGUAUUGUGGA | 62 | 155942 |
| 178 | hsa-miR-8085 | UGGGAGAGAGGACUGUGAGGC | 62 | 155942 |
| 179 | hsa-miR-3123 | CAGAGAAUUGUUUAAUC | 61 | 155351 |
| 180 | hsa-let-7c-3p | CUGUACAACCUUCUAGCUUUCC | 61 | 155428 |
| 181 | hsa-miR-6083 | CUUAUAUCAGAGGCUGUGGG | 61 | 156955 |
| 182 | hsa-miR-29b-2-5p | CUGGUUUCACAUGGUGGCUUAG | 61 | 154366 |
| 183 | hsa-miR-1185-2-3p | AUAUACAGGGGGAGACUCUCAU | 60 | 156452 |
| 184 | hsa-let-7f-2-3p | CUAUACAGUCUACUGUCUUUCC | 60 | 156452 |
| 185 | hsa-miR-6074 | GAUAUUCAGAGGCUAGGUGG | 60 | 154610 |
| 186 | hsa-miR-1185-1-3p | AUAUACAGGGGGAGACUCUUAU | 60 | 156452 |
| 187 | hsa-miR-4719 | UCACAAAUCUAUAAUAUGCAGG | 59 | 157266 |
| 188 | hsa-miR-7977 | UUCCCAGCCAACGCACCA | 59 | 156252 |
| 189 | hsa-miR-7849-3p | GACAAUUGUUGAUCUUGGGCCU | 59 | 155416 |
| 190 | hsa-miR-4698 | UCAAAAUGUAGAGGAAGACCCCA | 59 | 154559 |
| 191 | hsa-miR-551b-5p | GAAAUCAAGCGUGGGUGAGACC | 58 | 154680 |
| 192 | hsa-miR-2355-5p | AUCCCCAGAUACAAUGGACAA | 58 | 157084 |
| 193 | hsa-miR-548an | AAAAGGCAUUGUGGUUUUUG | 58 | 154948 |
| 194 | hsa-miR-6882-5p | UACAAGUCAGGAGCUGAAGCAG | 58 | 157231 |
| 195 | hsa-miR-3159 | UAGGAUUACAAGUGUCGGCCAC | 57 | 155314 |
| 196 | hsa-miR-4307 | AAUGUUUUUUCCUGUUUCC | 57 | 157040 |
| 197 | hsa-miR-105-5p | UCAAAUGCUCAGACUCCUGUGGU | 57 | 154567 |
| 198 | hsa-miR-7853-5p | UCAAAUGCAGAUCCUGACUUC | 57 | 154567 |
| 199 | hsa-miR-6507-3p | CAAAGUCCUUCCUAUUUUUCCC | 57 | 154507 |
| 200 | hsa-miR-1468-3p | AGCAAAAUAAGCAAAUGGAAAA | 56 | 154770 |
| 201 | hsa-miR-4680-3p | UCUGAAUUGUAAGAGUUGUUA | 55 | 156075 |
| 202 | hsa-miR-6871-5p | CAUGGGAGUUCGGGGUGGUUGC | 55 | 155943 |
| 203 | hsa-miR-7159-3p | UUUCUAUGUUAGUUGGAAG | 55 | 154924 |
| 204 | hsa-miR-6878-5p | AGGGAGAAAGCUAGAAGCUGAAG | 55 | 155942 |
| 205 | hsa-miR-6825-5p | UGGGGAGGUGUGGAGUCAGCAU | 55 | 156667 |
| 206 | hsa-miR-1537-5p | AGCUGUAAUUAGUCAGUUUUCU | 54 | 155780 |
| 207 | hsa-miR-548e-5p | CAAAAGCAAUCGCGGUUUUUGC | 54 | 155255 |
| 208 | hsa-miR-888-5p | UACUCAAAAAGCUGUCAGUCA | 53 | 155549 |
| 209 | hsa-miR-8069 | GGAUGGUUGGGGGCGGUCGGCGU | 53 | 156488 |
| 210 | hsa-miR-4519 | CAGCAGUGCGCAGGGCUG | 52 | 155304 |
| 211 | hsa-miR-6745 | UGGGUGGAAGAAGGUCUGGUU | 52 | 154878 |
| 212 | hsa-miR-196a-1-3p | CAACAACAUUAAACCACCCGA | 52 | 155852 |
| 213 | hsa-miR-7856-5p | UUUUAAGGACACUGAGGGAUC | 52 | 155342 |
| 214 | hsa-miR-892c-5p | UAUUCAGAAAGGUGCCAGUCA | 52 | 154428 |
| 215 | hsa-miR-9-5p | UCUUUGGUUAUCUAGCUGUAUGA | 52 | 155194 |
| 216 | hsa-miR-4795-3p | AUAUUAUUAGCCACUUCUGGAU | 52 | 157240 |
| 217 | hsa-miR-3140-3p | AGCUUUUGGGAAUUCAGGUAGU | 51 | 154914 |
| 218 | hsa-miR-8063 | UCAAAAUCAGGAGUCGGGGCUU | 51 | 154559 |
| 219 | hsa-miR-6792-5p | GUAAGCAGGGGCUCUGGGUGA | 50 | 155306 |

TABLE 11
miRNA modulators targeting SEQ ID NO: 1

| | | | | Example seed |
|---|---|---|---|---|
| | | | | location with |
| | | | | reference to |
| | | | Target | SEQ ID |
| No | Name | miRNA Sequence | Score | NO: 1 |
| 1 | hsa-miR-6128 | ACUGGAAUUGGAGUCAAAA | 99 | 137919 |
| 2 | hsa-miR-32-5p | UAUUGCACAUUACUAAGUUGCA | 98 | 138234 |
| 3 | hsa-miR-92a-3p | UAUUGCACUUGUCCCGGCCUGU | 98 | 138234 |
| 4 | hsa-miR-92b-3p | UAUUGCACUCGUCCCGGCCUCC | 98 | 138234 |
| 5 | hsa-miR-141-3p | UAACACUGUCUGGUAAAGAUGG | 97 | 140276 |
| 6 | hsa-miR-363-3p | AAUUGCACGGUAUCCAUCUGUA | 97 | 138234 |
| 7 | hsa-miR-200a-3p | UAACACUGUCUGGUAACGAUGU | 97 | 140276 |
| 8 | hsa-miR-367-3p | AAUUGCACUUUAGCAAUGGUGA | 97 | 138234 |
| 9 | hsa-miR-25-3p | CAUUGCACUUGUCUCGGUCUGA | 97 | 138234 |
| 10 | hsa-miR-30d-5p | UGUAAACAUCCCCGACUGGAAG | 94 | 139356 |
| 11 | hsa-miR-30c-5p | UGUAAACAUCCUACACUCUCAGC | 94 | 139356 |
| 12 | hsa-miR-30b-5p | UGUAAACAUCCUACACUCAGCU | 94 | 139356 |
| 13 | hsa-miR-221-3p | AGCUACAUUGUCUGCUGGGUUUC | 94 | 138255 |
| 14 | hsa-miR-222-3p | AGCUACAUCUGGCUACUGGGU | 94 | 138255 |
| 15 | hsa-miR-511-3p | AAUGUGUAGCAAAAGACAGA | 94 | 138650 |
| 16 | hsa-miR-30a-5p | UGUAAACAUCCUCGACUGGAAG | 94 | 139356 |
| 17 | hsa-miR-30e-5p | UGUAAACAUCCUUGACUGGAAG | 94 | 139356 |
| 18 | hsa-miR-6875-3p | AUUCUUCCUGCCCUGGCUCCAU | 92 | 137572 |
| 19 | hsa-miR-2052 | UGUUUUGAUAACAGUAAUGU | 91 | 138624 |
| 20 | hsa-miR-510-3p | AUUGAAACCUCUAAGAGUGGA | 91 | 140413 |
| 21 | hsa-miR-3163 | UAUAAAAUGAGGGCAGUAAGAC | 91 | 138581 |
| 22 | hsa-miR-203b-3p | UUGAACUGUUAAGAACCACUGGA | 91 | 138514 |
| 23 | hsa-miR-6806-5p | UGUAGGCAUGAGGCAGGGCCCAGG | 90 | 139700 |
| 24 | hsa-miR-500a-3p | AUGCACCUGGGCAAGGAUUCUG | 90 | 138233 |
| 25 | hsa-miR-6796-3p | GAAGCUCUCCCCUCCCCGCAG | 90 | 138338 |
| 26 | hsa-miR-3140-3p | AGCUUUUGGGAAUUCAGGUAGU | 89 | 137629 |
| 27 | hsa-miR-4262 | GACAUUCAGACUACCUG | 88 | 140173 |
| 28 | hsa-miR-4494 | CCAGACUGUGGCUGACCAGAGG | 88 | 138304 |
| 29 | hsa-miR-767-5p | UGCACCAUGGUUGUCUGAGCAUG | 87 | 138232 |
| 30 | hsa-miR-9-5p | UCUUUGGUUAUCUAGCUGUAUGA | 86 | 138373 |
| 31 | hsa-miR-12136 | GAAAAAGUCAUGGAGGCC | 86 | 138037 |
| 32 | hsa-miR-4705 | UCAAUCACUUGGUAAUUGCUGU | 86 | 137742 |
| 33 | hsa-miR-570-3p | CGAAAACAGCAAUUACCUUUGC | 86 | 138164 |
| 34 | hsa-miR-4659b-3p | UUUCUUCUUAGACAUGGCAGCU | 85 | 137573 |
| 35 | hsa-miR-181d-5p | AACAUUCAUUGUUGUCGGUGGGU | 85 | 140173 |
| 36 | hsa-miR-4659a-3p | UUUCUUCUUAGACAUGGCAACG | 85 | 137573 |
| 37 | hsa-miR-181b-5p | AACAUUCAUUGCUGUCGGUGGGU | 85 | 140173 |
| 38 | hsa-miR-8054 | GAAAGUACAGAUCGGAUGGGU | 85 | 138469 |
| 39 | hsa-miR-548av-5p | AAAAGUACUUGCGGAUUU | 85 | 138469 |
| 40 | hsa-miR-181c-5p | AACAUUCAACCUGUCGGUGAGU | 85 | 140173 |
| 41 | hsa-miR-181a-5p | AACAUUCAACGCUGUCGGUGAGU | 85 | 140173 |
| 42 | hsa-miR-548k | AAAAGUACUUGCGGAUUUUGCU | 85 | 138469 |
| 43 | hsa-miR-4795-3p | AUAUUAUUAGCCACUUCUGGAU | 84 | 140564 |
| 44 | hsa-miR-548ar-3p | UAAAACUGCAGUUAUUUUUGC | 84 | 138993 |
| 45 | hsa-miR-12114 | CAGGUGGAGGUGUGAGGUC | 84 | 137663 |
| 46 | hsa-miR-105-5p | UCAAAUGCUCAGACUCCUGUGGU | 83 | 137736 |
| 47 | hsa-miR-4500 | UGAGGUAGUAGUUUCUU | 83 | 139977 |
| 48 | hsa-miR-7853-5p | UCAAAUGCAGAUCCUGACUUC | 83 | 137736 |
| 49 | hsa-miR-1231 | GUGUCUGGGCGGACAGCUGC | 83 | 138637 |
| 50 | hsa-let-7e-5p | UGAGGUAGGAGGUUGUAUAGUU | 82 | 139977 |
| 51 | hsa-miR-98-5p | UGAGGUAGUAAGUUGUAUUGUU | 82 | 139977 |
| 52 | hsa-let-7f-5p | UGAGGUAGUAGAUUGUAUAGUU | 82 | 139977 |
| 53 | hsa-let-7c-5p | UGAGGUAGUAGGUUGUAUGGUU | 82 | 139977 |
| 54 | hsa-let-7i-5p | UGAGGUAGUAGUUUGUGCUGUU | 82 | 139977 |
| 55 | hsa-let-7b-5p | UGAGGUAGUAGGUUGUGUGGUU | 82 | 139977 |
| 56 | hsa-let-7g-5p | UGAGGUAGUAGUUUGUACAGUU | 82 | 139977 |
| 57 | hsa-let-7a-5p | UGAGGUAGUAGGUUGUAUAGUU | 82 | 139977 |
| 58 | hsa-miR-548au-5p | AAAAGUAAUUGCGGUUUUUGC | 81 | 138468 |
| 59 | hsa-miR-548y | AAAAGUAAUCACUGUUUUUGCC | 81 | 138468 |
| 60 | hsa-miR-548az-3p | AAAAACUGCAAUCACUUUUGC | 81 | 138993 |
| 61 | hsa-miR-548a-5p | AAAAGUAAUUGCGAGUUUUACC | 81 | 138468 |
| 62 | hsa-miR-548ae-5p | AAAAGUAAUUGUGGUUUUUG | 81 | 138468 |
| 63 | hsa-miR-548ab | AAAAGUAAUUGUGGAUUUUGCU | 81 | 138468 |
| 64 | hsa-miR-548am-5p | AAAAGUAAUUGCGGUUUUUGCC | 81 | 138468 |
| 65 | hsa-miR-548h-5p | AAAAGUAAUCGCGGUUUUUGUC | 81 | 138468 |
| 66 | hsa-let-7d-5p | AGAGGUAGUAGGUUGCAUAGUU | 81 | 139977 |
| 67 | hsa-miR-548ar-5p | AAAAGUAAUUGCAGUUUUUGC | 81 | 138468 |
| 68 | hsa-miR-548ap-5p | AAAAGUAAUUGCGGUCUUU | 81 | 138468 |
| 69 | hsa-miR-548a-3p | CAAAACUGGCAAUUACUUUUGC | 81 | 138993 |
| 70 | hsa-miR-548ak | AAAAGUAACUGCGGUUUUUGA | 81 | 138468 |
| 71 | hsa-miR-548bc | AAAAACUGUGAUUACUUUUGC | 81 | 138993 |
| 72 | hsa-miR-548w | AAAAGUAACUGCGGUUUUUGCCU | 81 | 138468 |
| 73 | hsa-miR-548f-3p | AAAAACUGUAAUUACUUUU | 81 | 138993 |
| 74 | hsa-miR-548ay-5p | AAAAGUAAUUGUGGUUUUUGC | 81 | 138468 |
| 75 | hsa-miR-548o-5p | AAAAGUAAUUGCGGUUUUUGCC | 81 | 138468 |
| 76 | hsa-miR-548i | AAAAGUAAUUGCGGAUUUUGCC | 81 | 138468 |
| 77 | hsa-miR-548p | UAGCAAAAACUGCAGUUACUUU | 81 | 137683 |
| 78 | hsa-miR-548as-5p | AAAAGUAAUUGCGGGUUUUGCC | 81 | 138468 |
| 79 | hsa-miR-548ad-5p | AAAAGUAAUUGUGGUUUUUG | 81 | 138468 |
| 80 | hsa-miR-8087 | GAAGACUUCUUGGAUUACAGGGG | 81 | 140023 |
| 81 | hsa-miR-548aq-5p | GAAAGUAAUUGCUGUUUUUGCC | 81 | 138468 |
| 82 | hsa-miR-548e-3p | AAAAACUGAGACUACUUUUGCA | 81 | 138993 |
| 83 | hsa-miR-548bb-5p | AAAAGUAACUAUGGUUUUUGCC | 81 | 138468 |
| 84 | hsa-miR-4458 | AGAGGUAGGUGUGGAAGAA | 81 | 139977 |
| 85 | hsa-miR-548j-5p | AAAAGUAAUUGCGGUCUUUGGU | 81 | 138468 |
| 86 | hsa-miR-559 | UAAAGUAAAUAUGCACCAAAA | 81 | 138468 |
| 87 | hsa-miR-548c-5p | AAAAGUAAUUGCGGUUUUUGCC | 81 | 138468 |
| 88 | hsa-miR-548d-5p | AAAAGUAAUUGUGGUUUUUGCC | 81 | 138468 |
| 89 | hsa-miR-548b-5p | AAAAGUAAUUGUGGUUUUGGCC | 81 | 138468 |
| 90 | hsa-miR-4503 | UUUAAGCAGGAAAUAGAAUUUA | 81 | 140841 |
| 91 | hsa-miR-6505-5p | UUGGAAUAGGGGAUAUCUCAGC | 81 | 137918 |
| 92 | hsa-miR-1250-3p | ACAUUUUCCAGCCCAUUCA | 80 | 138672 |
| 93 | hsa-miR-4656 | UGGGCUGAGGGCAGGAGGCCUGU | 80 | 139534 |
| 94 | hsa-miR-2114-5p | UAGUCCCUUCCUUGAAGCGGUC | 79 | 138976 |
| 95 | hsa-miR-5692a | CAAAUAAUACCACAGUGGGUGU | 79 | 140991 |
| 96 | hsa-miR-187-5p | GGCUACAACACAGGACCCGGGC | 79 | 138286 |
| 97 | hsa-miR-9983-3p | UUUUUUGCUGGAACAUUUCUGG | 79 | 138694 |
| 98 | hsa-miR-1255b-2-3p | AACCACUUUCUUUGCUCAUCCA | 79 | 140852 |
| 99 | hsa-miR-4469 | GCUCCCUCUAGGGUCGCUCGGA | 79 | 140433 |
| 100 | hsa-miR-129-5p | CUUUUUGCGGUCUGGGCUUGC | 78 | 138694 |
| 101 | hsa-miR-495-5p | GAAGUUGCCCAUGUUAUUUUCG | 78 | 140388 |
| 102 | hsa-miR-302c-5p | UUUAACAUGGGGGUACCUGCUG | 77 | 140279 |
| 103 | hsa-miR-23a-3p | AUCACAUUGCCAGGGAUUUCC | 76 | 140696 |
| 104 | hsa-miR-486-5p | UCCUGUACUGAGCUGCCCCGAG | 76 | 140295 |
| 105 | hsa-miR-5694 | CAGAUCAUGGGACUGUCUCAG | 76 | 138570 |
| 106 | hsa-miR-23b-3p | AUCACAUUGCCAGGGAUUACCAC | 76 | 140696 |
| 107 | hsa-miR-584-5p | UUAUGGUUUGCCUGGGACUGAG | 76 | 140404 |
| 108 | hsa-miR-23c | AUCACAUUGCCAGUGAUUACCC | 76 | 140696 |
| 109 | hsa-miR-3160-5p | GGCUUUCUAGUCUCAGCUCUCC | 76 | 138059 |
| 110 | hsa-miR-489-3p | GUGACAUCACAUAUACGGCAGC | 75 | 137624 |
| 111 | hsa-miR-548g-3p | AAAACUGUAAUUACUUUUGUAC | 75 | 138029 |
| 112 | hsa-miR-7162-3p | UCUGAGGUGGAACAGCAGC | 75 | 139979 |
| 113 | hsa-miR-3145-5p | AACUCCAAACACUCAAAACUCA | 74 | 138179 |
| 114 | hsa-miR-520e-5p | CUCAAGAUGGAAGCAGUUUCUG | 74 | 140818 |
| 115 | hsa-miR-302b-3p | UAAGUGCUUCCAUGUUUUAGUAG | 73 | 138857 |
| 116 | hsa-miR-302d-3p | UAAGUGCUUCCAUGUUUGAGUGU | 73 | 138857 |
| 117 | hsa-miR-520f-5p | CCUCUAAAGGGAAGCGCUUUCU | 73 | 138335 |
| 118 | hsa-miR-6885-3p | CUUUGCUUCCUGCUCCCCUAG | 73 | 138053 |
| 119 | hsa-miR-302a-3p | UAAGUGCUUCCAUGUUUUGGUGA | 73 | 138857 |
| 120 | hsa-miR-302e | UAAGUGCUUCCAUGCUU | 73 | 138857 |
| 121 | hsa-miR-302c-3p | UAAGUGCUUCCAUGUUUCAGUGG | 73 | 138857 |
| 122 | hsa-miR-4719 | UCACAAAUCUAUAAUAUGCAGG | 73 | 137738 |
| 123 | hsa-miR-4252 | GGCCACUGAGUCAGCACCA | 73 | 138088 |
| 124 | hsa-miR-5582-3p | UAAAACUUUAAGUGUGCCUAGG | 72 | 139763 |
| 125 | hsa-miR-577 | UAGAUAAAAUAUUGGUACCUG | 72 | 141041 |
| 126 | hsa-miR-6809-3p | CUUCUCUUCUCUCCUUCCCAG | 72 | 140905 |
| 127 | hsa-miR-543 | AAACAUUCGCGGUGCACUUCUU | 72 | 139720 |
| 128 | hsa-miR-3927-5p | GCCUAUCACAUAUCUGCCUGU | 72 | 140914 |
| 129 | hsa-miR-580-3p | UUGAGAAUGAUGAAUCAUUAGG | 71 | 137588 |
| 130 | hsa-miR-95-5p | UCAAUAAAUGUCUGUUGAAUU | 71 | 140714 |
| 131 | hsa-miR-548c-3p | CAAAAAUCUCAAUUACUUUUGC | 71 | 138464 |
| 132 | hsa-miR-4775 | UUAAUUUUUUGUUUCGGUCACU | 71 | 140417 |
| 133 | hsa-miR-4307 | AAUGUUUUUUCCUGUUUCC | 70 | 137815 |
| 134 | hsa-miR-6828-3p | AUCUGCUCUCUUGUUCCCAG | 70 | 140091 |
| 135 | hsa-miR-541-5p | AAAGGAUUCUGCUGUCGGUCCCACU | 70 | 138325 |
| 136 | hsa-miR-4766-5p | UCUGAAAGAGCAGUUGGUGUU | 69 | 138194 |
| 137 | hsa-miR-499a-5p | UUAAGACUUGCAGUGAUGUUU | 68 | 139774 |
| 138 | hsa-miR-6748-3p | UCCUGUCCCUGUCUCCUACAG | 68 | 138822 |
| 139 | hsa-miR-6844 | UUCUUUGUUUUUAAUUCACAG | 67 | 137786 |
| 140 | hsa-miR-651-3p | AAAGGAAAGUGUAUCCUAAAAG | 67 | 138438 |
| 141 | hsa-miR-605-3p | AGAAGGCACUAUGAGAUUUAGA | 67 | 138600 |
| 142 | hsa-miR-29a-5p | ACUGAUUUCUUUUGGUGUUCAG | 66 | 137999 |
| 143 | hsa-miR-4667-3p | UCCCUCCUUCUGUCCCCACAG | 65 | 140432 |
| 144 | hsa-miR-652-5p | CAACCCUAGGAGAGGGUGCCAUUCA | 65 | 140004 |
| 145 | hsa-miR-6513-5p | UUUGGGAUUGACGCCACAUGUCU | 65 | 140584 |
| 146 | hsa-miR-137-3p | UUAUUGCUUAAGAAUACGCGUAG | 65 | 138236 |
| 147 | hsa-miR-4289 | GCAUUGUGCAGGGCUAUCA | 64 | 140208 |
| 148 | hsa-miR-3180-5p | CUUCCAGACGCUCCGCCCCACGUCG | 64 | 140878 |
| 149 | hsa-miR-506-3p | UAAGGCACCCUUCUGAGUAGA | 64 | 138599 |
| 150 | hsa-miR-1470 | GCCCUCCGCCCGUGCACCCCG | 64 | 140432 |
| 151 | hsa-miR-6867-3p | CUCUCCCUCUUUACCCACUAG | 64 | 140434 |
| 152 | hsa-miR-124-3p | UAAGGCACGCGGUGAAUGCCAA | 64 | 138599 |
| 153 | hsa-miR-627-3p | UCUUUUCUUUGAGACUCACU | 64 | 139966 |
| 154 | hsa-miR-3613-3p | ACAAAAAAAAAAGCCCAACCCUUC | 63 | 140927 |
| 155 | hsa-miR-1283 | UCUACAAAGGAAAGCGCUUUCU | 63 | 138285 |
| 156 | hsa-miR-5582-5p | UAGGCACACUUAAAGUUAUAGC | 63 | 138598 |
| 157 | hsa-miR-369-3p | AAUAAUACAUGGUUGAUCUUU | 62 | 140989 |
| 158 | hsa-miR-548av-3p | AAAACUGCAGUUACUUUUGC | 62 | 138745 |
| 159 | hsa-miR-3146 | CAUGCUAGGAUAGAAAGAAUGG | 62 | 139155 |
| 160 | hsa-let-7c-3p | CUGUACAACCUUCUAGCUUUCC | 62 | 140293 |
| 161 | hsa-miR-520a-3p | AAAGUGCUUCCCUUUGGACUGU | 61 | 138857 |
| 162 | hsa-miR-520e-3p | AAAGUGCUUCCUUUUUGAGGG | 61 | 138857 |
| 163 | hsa-miR-520d-3p | AAAGUGCUUCUCUUUGGUGGGU | 61 | 138857 |
| 164 | hsa-miR-520b-3p | AAAGUGCUUCCUUUUAGAGGG | 61 | 138857 |
| 165 | hsa-miR-629-3p | GUUCUCCCAACGUAAGCCCAGC | 61 | 137601 |
| 166 | hsa-miR-520c-3p | AAAGUGCUUCCUUUUAGAGGGU | 61 | 138857 |
| 167 | hsa-miR-373-3p | GAAGUGCUUCGAUUUUGGGGUGU | 61 | 138857 |
| 168 | hsa-miR-372-3p | AAAGUGCUGCGACAUUUGAGCGU | 61 | 138857 |
| 169 | hsa-miR-20a-5p | UAAAGUGCUUAUAGUGCAGGUAG | 60 | 137756 |
| 170 | hsa-miR-106b-5p | UAAAGUGCUGACAGUGCAGAU | 60 | 137756 |
| 171 | hsa-miR-519d-3p | CAAAGUGCCUCCCUUUAGAGUG | 60 | 137756 |
| 172 | hsa-miR-93-5p | CAAAGUGCUGUUCGUGCAGGUAG | 60 | 137756 |
| 173 | hsa-miR-17-5p | CAAAGUGCUUACAGUGCAGGUAG | 60 | 137756 |
| 174 | hsa-miR-188-3p | CUCCCACAUGCAGGGUUUGCA | 60 | 138494 |
| 175 | hsa-miR-7-1-3p | CAACAAAUCACAGUCUGCCAUA | 60 | 137767 |
| 176 | hsa-miR-526b-3p | GAAAGUGCUUCCUUUUAGAGGC | 60 | 137756 |
| 177 | hsa-miR-20b-5p | CAAAGUGCUCAUAGUGCAGGUAG | 60 | 137756 |
| 178 | hsa-miR-7-2-3p | CAACAAAUCCCAGUCUACCUAA | 60 | 137767 |
| 179 | hsa-miR-106a-5p | AAAAGUGCUUACAGUGCAGGUAG | 60 | 137756 |
| 180 | hsa-miR-520a-5p | CUCCAGAGGGAAGUACUUUCU | 59 | 140878 |
| 181 | hsa-miR-3202 | UGGAAGGGAGAAGAGCUUUAAU | 59 | 138897 |
| 182 | hsa-miR-10522-5p | AGAAGAAUUGGCCUACUCAGG | 59 | 140010 |
| 183 | hsa-miR-3185 | AGAAGAAGGCGGUCGGUCUGCGG | 59 | 140010 |
| 184 | hsa-miR-3154 | CAGAAGGGGAGUUGGGAGCAGA | 59 | 138602 |
| 185 | hsa-miR-647 | GUGGCUGCACUCACUUCCUUC | 59 | 138202 |
| 186 | hsa-miR-525-5p | CUCCAGAGGGAUGCACUUUCU | 59 | 140878 |
| 187 | hsa-miR-5695 | ACUCCAAGAAGAAUCUAGACAG | 59 | 138178 |
| 188 | hsa-miR-511-5p | GUGUCUUUUGCUCUGCAGUCA | 58 | 137876 |
| 189 | hsa-miR-4287 | UCUCCCUUGAGGGCACUUU | 58 | 140434 |
| 190 | hsa-miR-3925-3p | ACUCCAGUUUUAGUUCUCUUG | 58 | 137964 |
| 191 | hsa-miR-513c-3p | UAAAUUUCACCUUUCUGAGAAGA | 58 | 139561 |
| 192 | hsa-miR-6079 | UUGGAAGCUUGGACCAACUAGCUG | 58 | 137935 |
| 193 | hsa-miR-4685-3p | UCUCCCUUCCUGCCCUGGCUAG | 58 | 140434 |
| 194 | hsa-miR-513a-3p | UAAAUUUCACCUUUCUGAGAAGG | 58 | 139561 |
| 195 | hsa-miR-548v | AGCUACAGUUACUUUUGCACCA | 57 | 138287 |
| 196 | hsa-miR-451b | UAGCAAGAGAACCAUUACCAUU | 57 | 140056 |
| 197 | hsa-miR-5680 | GAGAAAUGCUGGACUAAUCUGC | 57 | 138170 |
| 198 | hsa-miR-3120-3p | CACAGCAAGUGUAGACAGGCA | 57 | 137685 |
| 199 | hsa-miR-6831-5p | UAGGUAGAGUGUGAGGAGGAGGUC | 56 | 139976 |
| 200 | hsa-miR-3662 | GAAAAUGAUGAGUAGUGACUGAUG | 56 | 139088 |
| 201 | hsa-miR-5584-5p | CAGGGAAAUGGGAAGAACUAGA | 56 | 138966 |
| 202 | hsa-miR-3927-3p | CAGGUAGAUAUUUGAUAGGCAU | 56 | 139976 |
| 203 | hsa-miR-7113-3p | CCUCCCUGCCCGCCUCUCUGCAG | 56 | 140434 |
| 204 | hsa-miR-520f-3p | AAGUGCUUCCUUUUAGAGGGUU | 56 | 137821 |
| 205 | hsa-miR-3606-3p | AAAAUUUCUUUCACUACUUAG | 55 | 139561 |
| 206 | hsa-miR-424-3p | CAAAACGUGAGGCGCUGCUAU | 55 | 140194 |
| 207 | hsa-miR-10523-5p | GACAAUGAUGAGAAGACCUGAGGA | 55 | 138654 |
| 208 | hsa-miR-3664-3p | UCUCAGGAGUAAAGACAGAGUU | 55 | 139554 |
| 209 | hsa-miR-6728-5p | UUGGGAUGGUAGGACCAGAGGGG | 55 | 140360 |
| 210 | hsa-miR-27b-5p | AGAGCUUAGCUGAUUGGUGAAC | 54 | 137550 |
| 211 | hsa-miR-584-3p | UCAGUUCCAGGCCAACCAGGCU | 54 | 140368 |
| 212 | hsa-miR-4711-5p | UGCAUCAGGCCAGAAGACAUGAG | 54 | 137696 |
| 213 | hsa-miR-4511 | GAAGAACUGUUGCAUUUGCCCU | 54 | 137561 |
| 214 | hsa-miR-224-5p | UCAAGUCACUAGUGGUUCCGUUUAG | 54 | 137885 |
| 215 | hsa-miR-5089-5p | GUGGGAUUUCUGAGUAGCAUC | 53 | 138267 |
| 216 | hsa-miR-7973 | UGUGACCCUAGAAUAAUUAC | 53 | 138025 |
| 217 | hsa-miR-4473 | CUAGUGCUCUCCGUUACAAGUA | 53 | 137822 |
| 218 | hsa-miR-3159 | UAGGAUUACAAGUGUCGGCCAC | 53 | 139684 |
| 219 | hsa-miR-4764-5p | UGGAUGUGGAAGGAGUUAUCU | 53 | 138778 |
| 220 | hsa-miR-664b-3p | UUCAUUUGCCUCCCAGCCUACA | 52 | 138455 |
| 221 | hsa-miR-1266-5p | CCUCAGGGCUGUAGAACAGGGCU | 52 | 139554 |
| 222 | hsa-miR-202-3p | AGAGGUAUAGGGCAUGGGAA | 52 | 139978 |
| 223 | hsa-miR-499b-5p | ACAGACUUGCUGUGAUGUUCA | 52 | 138305 |
| 224 | hsa-miR-4518 | GCUCAGGGAUGAUAACUGUGCUGAGA | 52 | 139554 |
| 225 | hsa-miR-579-3p | UUCAUUUGGUAUAAACCGCGAUU | 52 | 138455 |
| 226 | hsa-miR-1264 | CAAGUCUUAUUUGAGCACCUGUU | 52 | 137710 |
| 227 | hsa-miR-6817-3p | UCUCUCUGACUCCAUGGCA | 52 | 139220 |
| 228 | hsa-miR-148b-5p | AAGUUCUGUUAUACACUCAGGC | 52 | 139016 |
| 229 | hsa-miR-6083 | CUUAUAUCAGAGGCUGUGGG | 51 | 138730 |
| 230 | hsa-miR-19b-2-5p | AGUUUUGCAGGUUUGCAUUUCA | 51 | 138625 |
| 231 | hsa-miR-19b-1-5p | AGUUUUGCAGGUUUGCAUCCAGC | 51 | 138625 |
| 232 | hsa-miR-4666a-5p | AUACAUGUCAGAUUGUAUGCC | 51 | 138120 |
| 233 | hsa-miR-3680-3p | UUUUGCAUGACCCUGGGAGUAGG | 51 | 138692 |
| 234 | hsa-miR-12124 | GAGGAAAUGCAGAUGCUGGA | 51 | 138678 |
| 235 | hsa-miR-19a-5p | AGUUUUGCAUAGUUGCACUACA | 51 | 138625 |
| 236 | hsa-miR-545-3p | UCAGCAAACAUUUAUUGUGUGC | 51 | 137684 |
| 237 | hsa-miR-4668-3p | GAAAAUCCUUUUUGUUUUUCCAG | 51 | 140502 |
| 238 | hsa-miR-4279 | CUCUCCUCCCGGCUUC | 51 | 137600 |
| 239 | hsa-miR-6124 | GGGAAAAGGAAGGGGGAGGA | 51 | 140061 |
| 240 | hsa-miR-4709-5p | ACAACAGUGACUUGCUCUCCAA | 51 | 140032 |
| 241 | hsa-miR-6134 | UGAGGUGGUAGGAUGUAGA | 50 | 139927 |

TABLE 12
Small molecule modulators targeting FNIPI

| | Exemplar | | | | |
|---|---|---|---|---|---|
| | Dissociation | | | | |
| No | Constants | Exemplar SMILES | Exemplar Image | Scaffold SMILES | Scaffold Image |
| 1 | 5.087e-09 | O═C1CC(/C═C/CCN2CCC(c3 ccc(Cl)cc3)═CC2)C2C[C@@] 23C═C(CC═C3Cl)N1 | [chemical structure] | O═C1CC(C═CCCN2CC═ C(c3ccccc3)CC2)C2C C23C═CCC(═C3)N1 | [chemical structure] |
| 2 | 3.017e-08 | [N]c1c2c(c3c(c1C14CCCC1C 4)CNC3═O)-c1ccccc1[N]2 | [chemical structure] | O═C1NCc2c(C34CCCC 3C4)cc3c(c21)- c1ccccc1[N]3 | [chemical structure] |
| 3 | 3.547e-08 | O═C(NCc1ccc(OC(F)(F)F)cc1) C1C2C═CCCC2C(═O)N1C1 CCOCC1 | [chemical structure] | O═C(NCc1ccccc1)C1C2 C═CCCC2C(═O)N1C1C COCC1 | [chemical structure] |
| 4 | 7.967e-08 | O═C1NC(═O)C2C1C1C3CC═ CC[C@]34N3C5CCC(O5)n5c (c2c2ccccc25)[C@]134 | [chemical structure] | O═C1NC(═O)C2C1c1c3 n(c4ccccc14)C1CCC(O1) N1C45CC═CCC4C2C3 15 | [chemical structure] |
| 5 | 7.967e-08 | CC1CC(O)[C@]2(F)C(CCC3 OC4(CCCC4)O[C@]13C(═O) COC(C)═O)CCC1═CC(═O)C═ C[C@@]12C | [chemical structure] | O═C1C═CC2C(═C1)CC C1CCC3OC4(CCCC4)O C3CCCC12 | [chemical structure] |
| 6 | 9.367e-08 | COC1CCC2C(CCN(C)C2CC2 CCC(OC3C[C@]4(OC)C(CC5 C/C(═C\C4OC)CCN5C)C═CC 3OC(═O)c3ccc([N+](═O)[O−])c c3)C═C2)C1 | [chemical structure] | O═C(OC1C═CC2CC3C C(═CCC2CC1OC1C═C C(CC2NCCC4CCCCC4 2)CC1)CCN3)c1ccccc1 | [chemical structure] |
| 7 | 9.367e-08 | Cc1c(NC(═O)c2cc3c(s2)CCC C3)cccc1- c1cn(C)c(═O)c(Nc2ccc(C3C(═ O)N(C)CCN3C)cc2)n1 | [chemical structure] | O═C(Nc1cccc(- c2c[nH]c(═O)c(Nc3ccc(C 4NCCNC4═O)cc3)n2)c1) c1cc2c(s1)CCCC2 | [chemical structure] |
| 8 | 1.101e-07 | COc1ccc(C2([O])[N]C2C2C[C @]23CC═CC(C2═NNC(═O)S C2C)═C3)cc1OC | [chemical structure] | O═C1NN═C(C2═CC3(C C═C2)CC3C2[N]C2c2cc ccc2)CS1 | [chemical structure] |
| 9 | 1.101e-07 | CC(C(═O)Nc1cc(C)ccn1)c1cc cc(C(═O)c2ccccc2)c1 | [chemical structure] | O═C(Cc1cccc(C(═O)c2c cccc2)c1)Nc1ccccn1 | [chemical structure] |
| 10 | 1.101e-07 | CNC1CC(N)C(O)C(OC2OCC (O)C3O[C@]4(OC(CN)C(O)C (O)C4O)OC23)C1O | [chemical structure] | C1CCC(OC2OCCC3OC 4(CCCCO4)OC32)CC1 | [chemical structure] |
| 11 | 1.295e-07 | [N]C(C[O])CCC(O)[C@]12CC 1CC(Cl)═C2 | [chemical structure] | C1═CC2CC2C1 | [chemical structure] |
| 12 | 1.522e-07 | Cn1cc(C2═C(c3cn(CCCSC(═ N)N)c4ccccc34)C(═O)NC2═O) c2ccccc21 | [chemical structure] | O═C1NC(═O)C(c2c[nH]c 3ccccc23)═C1c1c[nH]c2 ccccc12 | [chemical structure] |
| 13 | 1.522e-07 | Cc1cn2nc(C3═CC(═O)N4CC (N5CCNC6(CC6)C5)═CC═C4 [N]3)cc(C)c2n1 | [chemical structure] | O═C1C═C(c2ccc3nccn3 n2)[N]C2═CC═C(N3CCN C4(CC4)C3)CN12 | [chemical structure] |
| 14 | 1.522e-07 | O═c1c(- c2ccc(O)cc2)coc2c(C3OC(CO) C(O)C(O)C3O)c(O)ccc12 | [chemical structure] | O═c1c(- c2ccccc2)coc2c(C3CCC CO3)cccc12 | [chemical structure] |
| 15 | 1.789e-07 | CCOc1ccc(N2C([O])C3CCC═ NC3═NC2C(C)N(Cc2cccnc2) C(═O)Cc2ccc(OC(F)(F)F)cc2) cc1 | [chemical structure] | O═C(Cc1ccccc1)N(Cc1c ccnc1)CC1N═C2N═CCC C2CN1c1ccccc1 | [chemical structure] |
| 16 | 2.104e-07 | COc1ccc2c(c1)C(C(═O)N(Cc1 ccc(N(C)C)cc1)c1ccc(C(C)C)c c1)CCC2 | [chemical structure] | c1ccc2c(c1)CCCC2 | [chemical structure] |
| 17 | 2.473e-07 | Cc1c(C)c2c(c(C)c1O)CC[C@] (C)(COc1ccc(CC3SC(═O)NC 3═O)cc1)O2 | [chemical structure] | c1ccc2c(c1)CCCO2 | [chemical structure] |
| 18 | 2.908e-07 | O═C(Nc1ccc(F)cc1)N1CCc2c cccc2C1c1ccc(C(F)(F)F)cc1 | [chemical structure] | c1ccc(C2NCCc3ccccc32) cc1 | [chemical structure] |
| 19 | 2.908e-07 | Oc1cc2c(cc1O)C(CC1CC1Cc 1ccccc1)NCC2 | [chemical structure] | c1ccc2c(c1)CCNC2 | [chemical structure] |
| 20 | 3.419e-07 | CC1CC(O)C2C(CCC3CC(═O)O) CC[C@]32C)C1CCC(O)C(═O) COC(═O)CC(C)(C)C | [chemical structure] | C1CCC2CCCCC2C1 | [chemical structure] |
| 21 | 4.019e-07 | CCOC(═O)C(C)Oc1cccc2c1C CN(CC(═O)Nc1ccc3c(c1)OC CO3)C2═O | [chemical structure] | c1ccc2c(c1)OCCO2 | [chemical structure] |
| 22 | 4.725e-07 | O═C(/C═C/c1ccccc1)NC(NC(═ S)Nc1cccc2cccnc12)C(Cl)(Cl) Cl | [chemical structure] | c1ccc2ncccc2c1 | [chemical structure] |
| 23 | 4.725e-07 | CCOc1nc2cccc(C(═O)OC(C)═ O)c2n1Cc1ccc(- c2ccccc2C2═N[N]N[N]2)cc1 | [chemical structure] | c1ccc2[nH]cnc2c1 | [chemical structure] |
| 24 | 4.725e-07 | CC1═C(C(═O)Nc2cc3c[nH]nc 3cc2F)C(c2ccc(C(F)(F)F)cc2) CC(═O)N1 | [chemical structure] | c1ccc2n[nH]cc2c1 | [chemical structure] |
| 25 | 4.725e-07 | C(═N/n1cnnc1)\c1ccc(- c2ccccc2)cc1 | [chemical structure] | c1ccc(-c2ccccc2)cc1 | [chemical structure] |
| 26 | 4.725e-07 | [O]C(═O)C1Cc2ccccc2C2═C C(═O)CCC12 | [chemical structure] | O═C1C═C2c3ccccc3CC C2CC1 | [chemical structure] |
| 27 | 4.725e-07 | NC1NN═CC(c2c(O)ccc3ccccc 23)N1 | [chemical structure] | c1ccc2ccccc2c1 | [chemical structure] |
| 28 | 4.725e-07 | c1ccc(- c2cc3c(ccc4nonc43)nn2)cc1 | [chemical structure] | c1ccc2nonc2c1 | [chemical structure] |
| 29 | 5.555e-07 | CN1CCCCC1CN1CC(C(═O)c 2cc([N+](═O)[O−])ccc21)c2ccc cc21 | [chemical structure] | c1ccc2c(c1)CCN2 | [chemical structure] |
| 30 | 5.555e-07 | Cn1c(COc2ccc(CC3SC(═O)N C3═O)cc2)nc2ccccc2c1═O | [chemical structure] | O═c1[nH]cnc2ccccc12 | [chemical structure] |
| 31 | 5.555e-07 | c1ccc(- c2nn3nnnc3c3ccccc23)cc1 | [chemical structure] | c1cnn2nnnc2c1 | [chemical structure] |
| 32 | 6.531e-07 | CC(C)Oc1ccc(-c2nc(- c3cccc4c3CCC4NCCC(═O)O) no2)cc1C#N | [chemical structure] | c1ccc2c(c1)CCC2 | [chemical structure] |
| 33 | 6.531e-07 | Cc1ccc(- c2ccc3c(c2)C(N)C(═O)N3)cc1 | [chemical structure] | O═C1Cc2ccccc2N1 | [chemical structure] |
| 34 | 6.531e-07 | [NH]CCc1cc(O)c(O)cc1CCc1c cc(O)cc1 | [chemical structure] | c1ccc(CCc2ccccc2)cc1 | [chemical structure] |
| 35 | 6.531e-07 | Nc1cc(-c2ccc(- c3cc[nH]n3)cc2)ccn1 | [chemical structure] | c1ccc(-c2cc[nH]n2)cc1 | [chemical structure] |
| 36 | 6.531e-07 | [O][C@@]12C3C4CC[C@]56 C4C4[C@@]31C2C1CC(═O) C5[C@@]146 | [chemical structure] | C1CC2CCC2C1 | [chemical structure] |
| 37 | 6.531e-07 | O═C1C2C3CCC(C3)C2C(═O) c2ccccc21 | [chemical structure] | C1CC2CCC1C2 | [chemical structure] |
| 38 | 6.531e-07 | CN1CCCC(n2nc(Cc3ccc(Cl)c c3)c3ccccc3c2═O)CC1 | [chemical structure] | O═c1[nH]ncc2ccccc12 | [chemical structure] |
| 39 | 6.531e-07 | c1ccc(C2N═N[C@@]3(NN2)c 2cccnc23)nc1 | [chemical structure] | c1ccc(C2N═NC3(NN2)c 2cccnc23)nc1 | [chemical structure] |
| 40 | 6.531e-07 | NC1═N[N]c2c(c3ccccc3c3ccc cc23)[N]1 | [chemical structure] | C1═N[N]c2ccccc2[N]1 | [chemical structure] |
| 41 | 7.679e-07 | O═C1c2ccccc2C(═O)c2ccccc 21 | [chemical structure] | O═C1c2ccccc2C(═O)c2c cccc21 | [chemical structure] |
| 42 | 7.679e-07 | OC1C2C(C(O)c3ccccc32)c2c cccc21 | [chemical structure] | c1ccc2c(c1)CC1c3ccccc 3CC21 | [chemical structure] |
| 43 | 7.679e-07 | C1═CC(c2ccc3ccccc3c2)N2N═ C[N]C2═N1 | [chemical structure] | C1═CN═C2[N]C═NN2C1 | [chemical structure] |
| 44 | 7.679e-07 | Cc1ccc(- c2ccc3c(c2)C(═O)C(═O)N3)cc 1 | [chemical structure] | O═C1Nc2ccc (c3ccccc3)cc2C1═O | [chemical structure] |
| 45 | 7.679e-07 | CC1C2C(C(C═C(C)C)C═C1C) C(═O)NNC2═O | [chemical structure] | O═C1NNC(═O)C2CC═C CC12 | [chemical structure] |
| 46 | 7.679e-07 | Cc1cc(NC(═O)C2CCc3nc[nH] c3C2)no1 | [chemical structure] | c1nc2c([nH]1)CCCC2 | [chemical structure] |
| 47 | 7.679e-07 | NNc1nc2c(- c3ccccc3)c[nH]c2c(═O)[nH]1 | [chemical structure] | O═c1[nH]cnc2c(- c3ccccc3)c[nH]c12 | [chemical structure] |
| 48 | 7.679e-07 | OC1C(O)c2ccccc2-c2ccccc21 | [chemical structure] | c1ccc2c(c1)CCc1ccccc1- 2 | [chemical structure] |
| 49 | 7.679e-07 | Nc1nnc(-c2ccc(- c3ccccc3)cc2)o1 | [chemical structure] | c1ccc(-c2nnco2)cc1 | [chemical structure] |
| 50 | 7.679e-07 | CC1═C2N═C(c3cc(F)c4nc(C) cn4c3)CC(═O)N2CC(N2CCN (C)CC2)═C1 | [chemical structure] | c1ccn2ccnc2c1 | [chemical structure] |
| 51 | 7.679e-07 | Cc1ccccc1C1NC(═O)c2ccccc 2N1 | [chemical structure] | O═C1NC(c2ccccc2)Nc2 ccccc21 | [chemical structure] |
| 52 | 7.679e-07 | O═S1(═O)C2C═CC═CC2Oc2 ccccc21 | [chemical structure] | O═S1(═O)c2ccccc2OC2 C═CC═CC21 | [chemical structure] |
| 53 | 7.679e-07 | Cn1c2ccccc2c2cc(CC([O])═O) ccc21 | [chemical structure] | c1ccc2c(c1)[nH]c1ccccc 12 | [chemical structure] |
| 54 | 7.679e-07 | NC(═O)C12C3C1c1ccccc1C2 c1ccccc13 | [chemical structure] | c1ccc2c(c1)C1c3ccccc3 C3C2C13 | [chemical structure] |
| 55 | 9.027e-07 | Cc1cc(NC(═O)c2cc3ncccn3n2) no1 | [chemical structure] | c1cnc2ccnn2c1 | [chemical structure] |
| 56 | 9.027e-07 | [O]C(═O)c1cc (c2ccc3c(c2)CCCC3)on1 | [chemical structure] | c1cc(- c2ccc3c(c2)CCCC3)on1 | [chemical structure] |
| 57 | 9.027e-07 | C[c@12CCc3ccccc3[C@]1 (C)NC(═O)O2 | [chemical structure] | O═C1NC2c3ccccc3CCC 2O1 | [chemical structure] |
| 58 | 9.027e-07 | O═C1c2ccccc2- c2(nH]c(═O)c3ccccc3c21 | [chemical structure] | O═c1(nH)ccc2ccccc12 | [chemical structure] |
| 59 | 9.027e-07 | C1═Cc2nonc2C2C═C(c3cccc c3)N═C12 | [chemical structure] | C1═Cc2nonc2CC1 | [chemical structure] |
| 60 | 9.027e-07 | c1ccc(- n2nc3ccc4nonc4c3n2)cc1 | [chemical structure] | c1ccc2n[nH]nc2c1 | [chemical structure] |
| 61 | 9.027e-07 | CC1CCCN(C(═O)c2ccc3[nH]n nc3c2)C1 | [chemical structure] | c1ccc2[nH]nnc2c1 | [chemical structure] |
| 62 | 9.027e-07 | C1═NC2═NO[N]C2═NC1c1cc 2ccccc2o1 | [chemical structure] | C1═NC2═NO[N]C2═NC1 | [chemical structure] |
| 63 | 9.027e-07 | OC1CC2CCC3CC(c4ccccc4) C1C23 | [chemical structure] | C1CC2CCCC2C1 | [chemical structure] |
| 64 | 9.027e-07 | Cc1ccccclC1NC(═O)c2cccnc 2N1 | [chemical structure] | O═C1NC(c2ccccc2)Nc2 ncccc21 | [chemical structure] |
| 65 | 9.027e-07 | C[C@]1(O)CC(c2ccccc2)c2c ([nH][nH]c2═O)C1 | [chemical structure] | O═c1[nH][nH]c2c1CCCC 2 | [chemical structure] |
| 66 | 1.061e-06 | c1ccc(-c2n[nH]c(- c3cccnc3)n2)cc1 | [chemical structure] | c1ccc(-c2n[nH]c(- c3cccnc3)n2)cc1 | [chemical structure] |
| 67 | 1.061e-06 | O═c1[nH]c(- c2cccc(O)c2)nc2ccccc12 | [chemical structure] | O═c1[nH]c (-c2ccccc2)nc2ccccc12 | [chemical structure] |
| 68 | 1.061e-06 | Cc1cc(- c2cncc(C(C)(C)O)c2)ccc10 | [chemical structure] | c1ccc(-c2cccnc2)cc1 | [chemical structure] |
| 69 | 1.061e-06 | CC(═O)N1CCCC(c2cc3cccnc 3[nH]2)C1 | [chemical structure] | c1cnc2[nH]ccc2c1 | [chemical structure] |
| 70 | 1.061e-06 | Cc1ccc(N2Cc3ccccc3C(═O)N 2)cc1 | [chemical structure] | O═C1NN(c2ccccc2)Cc2 ccccc21 | [chemical structure] |
| 71 | 1.061e-06 | CC1═CCC2C(C1)C(═O)N(c1c c(C)on1)C2═O | [chemical structure] | O═C1C2CC═CCC2C(═O) N1c1ccon1 | [chemical structure] |
| 72 | 1.061e-06 | CCC(C(═O)O)c1ccc(N2Cc3cc ccc3C2═O)cc1 | [chemical structure] | O═C1NCc2ccccc21 | [chemical structure] |
| 73 | 1.061e-06 | c1cc2c3c(cccc3c1)C1═C2[N] C2═NO[N]C2═N1 | [chemical structure] | C1═Cc2cccc3cccc1c23 | [chemical structure] |
| 74 | 1.061e-06 | CC(═O)CC(c1ccc([N+](═O)[O-]) cc1)c1c(O)c2ccccc2oc1═O | [chemical structure] | O═c1ccc2ccccc2o1 | [chemical structure] |
| 75 | 1.061e-06 | Cc1cc(C)c2c(c1)C1CCCC1C (C([O])═O)N2 | [chemical structure] | c1ccc2c(c1)CCCN2 | [chemical structure] |
| 76 | 1.061e-06 | Cc1cc(Cn2c(═O)ccc3ccccc32) on1 | [chemical structure] | O═c1ccc2ccccc2[nH]1 | [chemical structure] |
| 77 | 1.061e-06 | CC(NN)c1ccc2c(c1)C═C1CC═ CC═C12 | [chemical structure] | C1═CCC2═Cc3ccccc3C 2═C1 | [chemical structure] |
| 78 | 1.061e-06 | Cc1ccc(C2CC(═O)c3cn[nH]c3 C2)cc1 | [chemical structure] | O═C1CC(c2ccccc2)Cc2 [nH]ncc21 | [chemical structure] |
| 79 | 1.061e-06 | O═C1CC(c2nc(- c3cccc(F)c3)no2)CN1 | [chemical structure] | O═C1CC(c2nc(- c3ccccc3)no2)CN1 | [chemical structure] |
| 80 | 1.061e-06 | O═C1CCC(N2C(═O)c3ccccc3 C2═O)C(═O)N1 | [chemical structure] | O═C1NC(═O)c2ccccc21 | [chemical structure] |
| 81 | 1.061e-06 | Nc1ccc2c(c1)/C(═N/O)c1cccc c1-2 | [chemical structure] | N═C1c2ccccc2- c2ccccc21 | [chemical structure] |
| 82 | 1.061e-06 | Cc1cccc(C(═O)n2nnc3ccccc3 2)c1 | [chemical structure] | O═C(c1cccccl)n1nnc2c cccc21 | [chemical structure] |
| 83 | 1.248e-06 | Cc1ccc2c(ccc3nc(N)nc(N)c32) c1 | [chemical structure] | c1ccc2ncncc2c1 | [chemical structure] |
| 84 | 1.248e-06 | Oc1cccc(C2N═C(c3ccccn3)[N] N2)c1 | [chemical structure] | c1ccc(C2N═C(c3ccccn3) [N]N2)cc1 | [chemical structure] |
| 85 | 1.248e-06 | [O]C(═O)c1ccc(- c2ccc3c(c2)OCO3)cc1 | [chemical structure] | c1ccc2c(c1)OCO2 | [chemical structure] |
| 86 | 1.248e-06 | O═c1[nH]c2ccccc2c2ccc([N+] (═O)[O-])cc12 | [chemical structure] | O═c1[nH]c2ccccc2c2ccc cc12 | [chemical structure] |
| 87 | 1.248e-06 | Cc1cccc(C2NC(═O)c3ccccc3 O2)c1 | [chemical structure] | O═C1NC(c2ccccc2)Oc2 ccccc21 | [chemical structure] |
| 88 | 1.248e-06 | Oc1ccccclC1CC(c2ccccc2)N N1 | [chemical structure] | c1ccc(C2CC(c3ccccc3)N N2)cc1 | [chemical structure] |
| 89 | 1.248e-06 | Cc1ccc(C2═NNC(═O)C3CCC CC32)cc1 | [chemical structure] | O═C1NN═C(c2ccccc2)C 2CCCCC12 | [chemical structure] |
| 90 | 1.248e-06 | O═C1CCC(C2CCc3cc(O)ccc3 C2)C1 | [chemical structure] | O═C1CCC(C2CCc3cccc c3C2)C1 | [chemical structure] |
| 91 | 1.248e-06 | OC1C(O)C2c3ccccc3C1c1ccc cc12 | [chemical structure] | c1ccc2c(c1)C1CCC2c2c cccc21 | [chemical structure] |
| 92 | 1.248e-06 | O═C(Nc1ccc2nccnc2c1)c1ccc cc1 | [chemical structure] | c1ccc2nccnc2c1 | [chemical structure] |
| 93 | 1.248e-06 | CC(═O)c1ccc(- c2ccc(C(N)═O)cn2)cc1 | [chemical structure] | c1ccc(-c2ccccn2)cc1 | [chemical structure] |
| 94 | 1.248e-06 | O═c1oc2ccccc2c2ccc([N+](═ O)[O-])cc12 | [chemical structure] | O═c1oc2ccccc2c2ccccc 12 | [chemical structure] |
| 95 | 1.248e-06 | O═C1c2ccccc2- c2ccc([N+](═O)[O-])cc21 | [chemical structure] | O═C1c2ccccc2- c2ccccc21 | [chemical structure] |
| 96 | 1.248e-06 | O═C(Nc1n[nH]c2cc(F)ccc12)c 1ccoc1 | [chemical structure] | c1ccc2[nH]ncc2c1 | [chemical structure] |
| 97 | 1.248e-06 | [O]S([O])([O])c1ccc2c(c1)oc1c cccc12 | [chemical structure] | c1ccc2occc2c1 | [chemical structure] |
| 98 | 1.248e-06 | COC1Nc2ccccc2- c2ccccc2C1═O | [chemical structure] | O═C1CNc2ccccc2- c2ccccc21 | [chemical structure] |
| 99 | 1.248e-06 | O═C(Nc1ccccn1)c1ccc2c(c1) CCO2 | [chemical structure] | c1ccc2c(c1)CCO2 | [chemical structure] |
| 100 | 1.248e-06 | Cc1cc(═O)[nH]c(/C═C/c2cc(F) ccc2F)n1 | [chemical structure] | O═c1ccnc(C═Cc2ccccc2) [nH]1 | [chemical structure] |
| 101 | 1.467e-06 | Cc1cccc(- c2noc(C3CCCCN3)n2)c1 | [chemical structure] | c1ccc(- c2noc(C3CCCCN3)n2)c c1 | [chemical structure] |
| 102 | 1.467e-06 | Fc1ccc(- c2nnc3n2CCCCC3)cc1 | [chemical structure] | c1ccc(- c2nnc3n2CCCCC3)cc1 | [chemical structure] |
| 103 | 1.467e-06 | Cc1ccc(-c2nc(- c3nonc3N)no2)cc1 | [chemical structure] | c1ccc(-c2nc(- c3cnon3)no2)cc1 | [chemical structure] |
| 104 | 1.467e-06 | Nc1cccc(-c2nc(- c3ccccc3)no2)c1 | [chemical structure] | c1ccc(-c2noc(- c3ccccc3)n2)cc1 | [chemical structure] |
| 105 | 1.467e-06 | OC1CC(c2ccc(O)cc2)Oc2ccc cc21 | [chemical structure] | c1ccc(C2CCc3ccccc3O2) cc1 | [chemical structure] |
| 106 | 1.467e-06 | [O]c1ccccc1C(═O)n1ccc2cccc c21 | [chemical structure] | O═C(c1ccccc1)n1ccc2cc ccc21 | [chemical structure] |
| 107 | 1.467e-06 | Nc1ccc(C2N═C(c3ccccc3)[N] N2)cc1 | [chemical structure] | c1ccc(C2═NC(c3ccccc3) N[N]2)cc1 | [chemical structure] |
| 108 | 1.467e-06 | Cc1cc2nc(- c3ccc(N)cc3)[nH]c2cc1N | [chemical structure] | c1ccc(- c2nc3ccccc3[nH]2)cc1 | [chemical structure] |
| 109 | 1.467e-06 | [O]C(═O)C1c2ccccc2- c2ccccc21 | [chemical structure] | c1ccc2c(c1)Cc1ccccc1-2 | [chemical structure] |
| 110 | 1.467e-06 | O═C1Cc2ccccc2C(c2ccccc2) N1 | [chemical structure] | O═C1Cc2ccccc2C(c2ccc cc2)N1 | [chemical structure] |
| 111 | 1.467e-06 | [NH]c1[nH]c([N]c2ccc(F)cc2)c 2ccccc12 | [chemical structure] | c1ccc2c[nH]cc2c1 | [chemical structure] |
| 112 | 1.467e-06 | O═C(c1ccccc1)c1c[nH]c2cccc c2c1═O | [chemical structure] | O═c1cc[nH]c2ccccc12 | [chemical structure] |
| 113 | 1.467e-06 | Oc1cccc(-c2nc(- c3cccnc3)no2)c1 | [chemical structure] | c1ccc(-c2nc(- c3cccnc3)no2)cc1 | [chemical structure] |
| 114 | 1.467e-06 | Oc1cccc(-c2nc(- c3ccncc3)no2)c1 | [chemical structure] | c1ccc(-c2nc(- c3ccncc3)no2)cc1 | [chemical structure] |
| 115 | 1.467e-06 | Oc1ccc(-c2cccc(- n3cnnc3)c2)cc1 | [chemical structure] | c1ccc(-n2cnnc2)cc1 | [chemical structure] |
| 116 | 1.467e-06 | CC(NN)c1ccc2c(c1)C═C1C═ CC═CC12 | [chemical structure] | C1═CC2═CC═CC2C═C1 | [chemical structure] |
| 117 | 1.467e-06 | Cc1ccc(Nc2nc3[nH]ncc3c(═O) [nH]2)cc1 | [chemical structure] | O═c1[nH]cnc2[nH]ncc12 | [chemical structure] |
| 118 | 1.467e-06 | OC1CCCN(c2ncnc3cccc(F)c2 3)C1 | [chemical structure] | c1ccc2c(N3CCCCC3)nc nc2c1 | [chemical structure] |
| 119 | 1.467e-06 | Cc1ccc(- c2nc(C3CCOC3)no2)cc1F | [chemical structure] | c1ccc(- c2nc(C3CCOC3)no2)cc1 | [chemical structure] |
| 120 | 1.467e-06 | O═C(c1cc[nH]c(═O)c1)N1CC C2CCCCC21 | [chemical structure] | C1CCC2NCCC2C1 | [chemical structure] |
| 121 | 1.467e-06 | Cc1ccc(- c2cc(═O)[nH]c(C3CC3)n2)cc1 | [chemical structure] | O═c1cc (c2ccccc2)nc[nH]1 | [chemical structure] |
| 122 | 1.467e-06 | CN/C(═N\c1ccc(C2═NNC(═O) CC2C)cc1)NC#N | [chemical structure] | O═C1CCC(c2ccccc2)═N N1 | [chemical structure] |
| 123 | 1.725e-06 | Fc1cccc(-c2nnc(- c3cccnc3)o2)c1 | [chemical structure] | c1ccc(-c2nnc(- c3cccnc3)o2)cc1 | [chemical structure] |
| 124 | 1.725e-06 | OC1c2ccccc2Cc2ccccc21 | [chemical structure] | c1ccc2c(c1)Cc1ccccc1C 2 | [chemical structure] |
| 125 | 1.725e-06 | NC(═O)c1ccc2nc (c3ccccc3)oc2c1 | [chemical structure] | c1ccc(- c2nc3ccccc3o2)cc1 | [chemical structure] |
| 126 | 1.725e-06 | [O]C(═O)c1cccc (c2cccc(═O)[nH]2)c1F | [chemical structure] | O═c1cccc(- c2ccccc2)[nH]1 | [chemical structure] |
| 127 | 1.725e-06 | Nc1nc2ccccc2n1/N═C/c1cccc c1 | [chemical structure] | C(═Nn1cnc2ccccc21)c1c cccc1 | [chemical structure] |
| 128 | 1.725e-06 | Oc1ccc(/N═C/c2ccc3c(c2)OC O3)cc1 | [chemical structure] | C(═Nc1ccccc1)c1ccc2c (c1)OCO2 | [chemical structure] |
| 129 | 1.725e-06 | Oc1ccc(-c2n[nH]c(- c3ccncc3)n2)cc1 | [chemical structure] | c1ccc(-c2n[nH]c(- c3ccncc3)n2)cc1 | [chemical structure] |
| 130 | 1.725e-06 | O═C(Nc1nnc2ccccn12)C1CC CCC1 | [chemical structure] | c1ccn2cnnc2c1 | [chemical structure] |
| 131 | 1.725e-06 | Nc1nccc(-c2cccc(- c3cc[nH]n3)c2)n1 | [chemical structure] | c1ccc(-c2ccncn2)cc1 | [chemical structure] |
| 132 | 1.725e-06 | O═C(c1nccc2ccccc12)N1CC (CF)C1 | [chemical structure] | c1ccc2cnccc2c1 | [chemical structure] |
| 133 | 1.725e-06 | CC(═O)Nc1cc2c(cc10)═C1C═ CC═CC1C═2 | [chemical structure] | C1═CC2═c3ccccc3═CC 2C═C1 | [chemical structure] |
| 134 | 1.725e-06 | CC1CN(C(═O)C(C)C)CC(c2c cccc2)O1 | [chemical structure] | c1ccc(C2CNCCO2)cc1 | [chemical structure] |
| 135 | 2.028e-06 | Fc1ccc(-c2nnc(- c3ccncc3)o2)cc1 | [chemical structure] | c1ccc(-c2nnc(- c3ccncc3)o2)cc1 | [chemical structure] |
| 136 | 2.028e-06 | [O]C(═O)c1nc(C2═Cc3ccccc3 OC2)no1 | [chemical structure] | C1═Cc2ccccc2OC1 | [chemical structure] |
| 137 | 2.028e-06 | O═C1C2C3CCC(C3)C2C(═O) C2C3CCC(C3)C21 | [chemical structure] | O═C1C2C3CCC(C3)C2 C(═O)C2C3CCC(C3)C1 2 | [chemical structure] |

[chemical structure]

TABLE 13
Small molecule modulators targeting FNIP2

| | Exemplar | | | | |
|---|---|---|---|---|---|
| | Dissociation | | | | |
| No | Constants | Exemplar SMILES | Exemplar Image | Scaffold SMILES | Scaffold Image |
| 1 | 4.019e-07 | CCSC(C(C(═O)N(C)C(C(C)C)C(═O)O CC(NC(═O)c1cnc2ccccc2n1)C(═O)N C(C)C(═O)[N]C)N(C)C(═O)C(C)NC(═ O)C(COC[O])NC(═O)c1cnc2ccccc2n1) [S](C)CC1CC11 | [chemical structure] | c1ccc2nccnc2c1 | [chemical structure] |
| 2 | 5.555e-07 | O═C(O)c1ccc2cc (c3ccc(O)c(C45CC6CC(CC(C6)C4)C5) c3)ccc2c1 | [chemical structure] | c1ccc(- c2cccc(C34CC5CC (CC(C5)C3)C4)c2)cc1 | [chemical structure] |
| 3 | 5.555e-07 | Cc1ccc(C(═O)Nc2ccc(S([O])([O])O)c3 cc(S([O])([O])O)cc(S([O])([O])O)c23)c c1NC(═O)c1cccc(NC(═O)Nc2cccc(C (═O)Nc3cc(C(═O)Nc4ccc(S([O])([O])O) c5cc(S([O])([O])O)cc(S([O])([O])O)c4 5)ccc3C)c2)c1 | [chemical structure] | c1ccc2ccccc2c1 | [chemical structure] |
| 4 | 7.679e-07 | COC(C(C)N(C)C(═O)c1ccccc1)[C@] (C)(OC)n1c2ccccc2c2c3c(c4c(c21)[N] C1CCCCC14)C(═O)NC3 | [chemical structure] | O═C1NCc2ccccc21 | [chemical structure] |
| 5 | 9.027e-07 | CN1CC(/C(O)═N/[C@]2(C)O[C@@]3 (O)C4CCCN4C(═O)C(Cc4ccccc4)N3 C2═O)C═C2C1Cc1c[nH]c3cccc2c13 | [chemical structure] | c1ccc2[nH]ccc2c1 | [chemical structure] |
| 6 | 9.027e-07 | O═C(NC1CCN(CCCCC2(C(═O)NCC (F)(F)F)c3ccccc3- c3ccccc32)CC1)c1ccccc1- c1ccc(C(F)(F)F)cc1 | [chemical structure] | c1ccc2c(c1)- c1ccccc1C2CCCCN1 CCCCC1 | [chemical structure] |
| 7 | 1.061e-06 | CC(C)NC(═O)C1CCC(n2c(NC(═O)c3 ccc(F)cc3)nc3ccc(CN4CCC(C(C)(C) O)CC4)cc32)CC1 | [chemical structure] | c1ccc2[nH]cnc2c1 | [chemical structure] |
| 8 | 1.061e-06 | COc1ccc2c(OC3CC4C(═O)N[C@]5 (C(═O)O)CC5/C═C/CCCCCC(NC(═O) OC5CCCC5)C(═O)N4C3)cc(C3CSC (NC(C)C)[N]3)nc2c1 | [chemical structure] | O═C1NCCC═CCCC CCCC(═O)N2CCCC 12 | [chemical structure] |
| 9 | 1.248e-06 | CN(C(Cc1ccc(OS([O])([O])c2cccc3c2 C2CN2C3)cc1)C(═O)N1CCN(c2ccccc 2)CC1)S(═O)(═O)c1cccc2c1C1CN1C 2 | [chemical structure] | C1═NCc2ccccc21 | [chemical structure] |
| 10 | 1.248e-06 | COCOC1CCC(O)COC/C1═C\C═C\C (C)[C@]([O])(OC1CCC(OC2CC(OC) [C@]3(CN3)C(C)O2)C(C)O1)C(C)C(C) C1CC1C10[C@@]12C═CC(C)C(C (C)C)O2 | [chemical structure] | C1═CC2(OCC1)OC2 C1CC1CCCOC1CC C(OC2CCCCO2)CO 1 | [chemical structure] |
| 11 | 1.248e-06 | O═C(O)c1cc(O)c2c(O)c3c(OC4OC(C O)C(O)C(O)C4O)cccc3c(- c3c4cc(C(═O)O)cc(O)c4c(O)c4c(OC5 OC(CO)C(O)C(O)C5O)cccc34)c2c1 | [chemical structure] | c1ccc2c(- c3c4ccccc4cc4c(OC 5CCCCO5)cccc34)c 3cccc(OC4CCCCO4) c3cc2c1 | [chemical structure] |
| 12 | 1.725e-06 | CN(C)C/C═C/C(═O)Nc1cccc(C(═O)N c2cccc(Nc3ncc(Cl)c(C4CNc5ccccc54) n3)c2)c1 | [chemical structure] | O═C(Nc1cccc(Nc2nc cc(C3CNc4ccccc43) n2)c1)c1ccccc1 | [chemical structure] |
| 13 | 1.725e-06 | CC(C)C1NC(═O)C(NC(═O)C2C(N)C (═O)C(C)C3═C2N═C2C(O3)C(C)═CC ═C2C(═O)NC2C(C)OC(═O)C(C(C)C) N(C)C(═O)CN(C)C(═O)C3CCCN3C(═ O)C(C(C)C)NC2═O)C(C)OC(═O)C(C (C)C)N(C)C(═O)CN(C)C(═O)C2CCCN 2C1═O | [chemical structure] | O═C1CC2═C(N═C3 C(C(═O)NC4COC(═ O)CNC(═O)CNC(═O) C5CCCN5C(═O)CN C4═O)═CC═CC3O2) C(C(═O)NC2COC(═ O)CNC(═O)CNC(═O) C3CCCN3C(═O)CN C2═O)C1 | [chemical structure] |
| 14 | 2.028e-06 | CC1CCC(OC2CC(O)C(OC3CC(O)C (OC4CC(O)C(O)C(C)O4)C(C)O3)C(C) O2)CC1CCC1CCC(O)[C@]2(C)C[C @]120 | [chemical structure] | C1CCC2CC2C1 | [chemical structure] |
| 15 | 2.028e-06 | CC(CCN(C)Cc1ccccn1)n1cc(C2═C(c 3cn(C)c4ccccc34)C(═O)NC2═O)c2cc ccc21 | [chemical structure] | O═C1C═C(c2c[nH]c3 ccccc23)C(═O)N1 | [chemical structure] |
| 16 | 2.384e-06 | COc1cc2c(cc1OC)CN(CCc1ccc(N3[N] N═C(c4cc(OC)c(OC)cc4NC(═O)C4C C(═O)c5ccccc5O4)[N]3)cc1)CC2 | [chemical structure] | c1ccc2c(c1)CCNC2 | [chemical structure] |
| 17 | 2.384e-06 | CCN1CCN(c2ccc3cc(- c4cn5cc(C)nc(C)c5n4)oc(═O)c3c2)C C1C | [chemical structure] | c1cn2ccnc2cn1 | [chemical structure] |
| 18 | 2.384e-06 | Cc1csc(-c2nnc(Nc3ccc(Oc4ncccc4- c4ccnc(N)n4)cc3)c3ccccc23)c1 | [chemical structure] | c1ccc2cnncc2c1 | [chemical structure] |
| 19 | 2.384e-06 | OC(c1ccc(- c2ccc(CN3CCN(Cc4ccncc4)CC3)cc2) c(F)c1)(C(F)(F)F)C(F)(F)F | [chemical structure] | c1ccc(-c2ccccc2)cc1 | [chemical structure] |
| 20 | 2.384e-06 | O═C(/C═C\N1CN═C(c2cc(C(F)(F)F)c c(C(F)(F)F)c2)[N]1)NNc1ccccn1 | [chemical structure] | c1ccc(C2═NCN[N]2) cc1 | [chemical structure] |
| 21 | 2.803e-06 | CC1CC(OC(═O)C(O)C(/N═C(/O)C2═ CC═CCC2)C2═CCCCC2)[C@@]12C C2(O)COC(═O)c1ccccc1 | [chemical structure] | C1CC2(C1)CC2 | [chemical structure] |
| 22 | 2.803e-06 | CC(C)CC(C([O])[N]OC(C)[C@]1([O]) C(C(CC(C)C)C2(OC(CCc3ccc(N4CC OCC4)cc3)C(═O)[N][C@@]3(CC(C)C) OC3C(C)[O])OO2)N1C)N(C)C(C)[O] | [chemical structure] | c1ccc(N2CCOCC2)c c1 | [chemical structure] |
| 23 | 2.803e-06 | Cc1ccc2cc(-c3c(C)ccc(C(═O)c4c(- c5ccccc5)n(C)n(- c5ccccc5)c4═O)c3N)ccc2n1 | [chemical structure] | c1ccc2ncccc2c1 | [chemical structure] |
| 24 | 2.803e-06 | C/C═C\[N]C[C@@11(C2CCN(Cc3cnc c(C)c3)CC2)CCCc2cc(Cl)ccc21 | [chemical structure] | c1ccc2c(c1)CCCC2 | [chemical structure] |
| 25 | 2.803e-06 | CCOC(CO)Oc1coc2cc(O)cc(O)c2c1═ O | [chemical structure] | O═c1ccoc2ccccc12 | [chemical structure] |
| 26 | 2.803e-06 | CCc1cc(Nc2nccc(-c3c(- c4ccc(OC)c(C(═O)Nc5c(F)cccc5F)c4) nc4ccccn34)n2)c(OC)cc1N1CCC(N2 CCN(S(C)(═O)═O)CC2)CC1 | [chemical structure] | c1ccn2ccnc2c1 | [chemical structure] |
| 27 | 3.295e-06 | CN(C)C(═O)C(CCN1CCC(O)(c2ccc (Cl)cc2)CC1)(c1ccccc1)c1ccccc1 | [chemical structure] | c1ccc(Cc2ccccc2)cc 1 | [chemical structure] |
| 28 | 3.295e-06 | CC1CC2C[C@](C)(CCC(O)C(C)═O)C CC2[C@]2(C)C3C[C@]3([O])C═C12 | [chemical structure] | C1CCC2CCCCC2C1 | [chemical structure] |
| 29 | 3.295e-06 | [O]C(OC1COc2cc(O)cc(O)c2C1═O)C (O)CO | [chemical structure] | O═C1CCOc2ccccc21 | [chemical structure] |
| 30 | 3.295e-06 | CC(C)(/C═C(C#N)C(═O)N1CCCC(n2 nc(- c3ccc(Oc4ccccc4)cc3F)c3c(N)ncnc32) C1)N1CCN(C2COC2)CC1 | [chemical structure] | c1ncc2cnn(C3CCCN C3)c2n1 | [chemical structure] |
| 31 | 3.295e-06 | COC1/C═C/O[C@@]2(C)Oc3c(C)c(O) c4c(O)c(c(C[N][N]CN5CCCCC5)c(O) c4c3C2═O)NC(═O)/C(C)═C\C═C\C(C) C(O)C(C)C(O)C(C)C(OC(C)═O)C1c | [chemical structure] | O═C1C═CC═CCCC CCCCCC═COC2Oc3 ccc4cc(ccc4c3C2═O) N1 | [chemical structure] |
| 32 | 3.295e-06 | COc1cc2c(cc1Oc1c3c(cc4c1C(CC1C CCCC1)N(C)CC4)OCO3)C(CC1CC[ C@]3(OC)CC13)N(C)CC2 | [chemical structure] | c1ccc2c(c1)OCO2 | [chemical structure] |
| 33 | 3.874e-06 | CCC(CCC(C)C1CCC2C3CC═C4CC( OC5OC(CO)C(O)C(O)C5O)CC[C@]4 (C)C3CC[C@]12C)C(C)C | [chemical structure] | C1═C2CCCCC2C2C CC3CCCC3C2C1 | [chemical structure] |
| 34 | 3.874e-06 | Cc1ccc(NC(═O)c2ccc(CN3CCN(C)C C3)cc2)cc1Nc1nccc(-c2cccnc2)n1 Cc1ccc(C(═O)Nc2ccc(CN3CCN(C)C | [chemical structure] | c1cncc(-c2ccncn2)c1 | [chemical structure] |
| 35 | 3.874e-06 | Ccc1ccc(C═O)Nc2ccc(CN3CCN(C)C C3)c(C(F)(F)F)c2cc1C#Cc1cnc2cccn n12 | [chemical structure] | c1cnn2ccnc2c1 | [chemical structure] |
| 36 | 3.874e-06 | O═C1CCc2c(Oc3ccc4c(c3)C3C(O4)C 3c3nc4ccc(C(F)(F)F)cc4[nH]3)ccnc2 N1 | [chemical structure] | O═C1CCc2c(Oc3ccc cc3)ccnc2N1 | [chemical structure] |
| 37 | 3.874e-06 | CCOC(OCC[C@@]2(O)CCC3C(C( O)C[C@](C)(C(C)C4═CC(═O)OC4)[C @]3(C)O)[C@@]23CC3O)C(O)C(O) C1O | [chemical structure] | C1CCC2C(C1)CCCC 21CC1 | [chemical structure] |
| 38 | 3.874e-06 | COc1ccc(C2CC(═O)c3c(O)cc(OC4O C(C)C(OCOC(CO)CO)C(O)C4O)cc3 O2)cc10 | [chemical structure] | O═C1CC(c2ccccc2) Oc2cc(OC3CCCCO3) ccc21 | [chemical structure] |
| 39 | 3.874e-06 | CC1OC(OC2C(OC3C[C@]4(C)C(CC( O)C5C([C@](C)(CCC═C(C)C)OC6O C(CO)C(O)C(O)C6O)CC[C@]54C)[C @@]4(C)CCC(O)C(C)(C)C34)OC(CO) C(O)C2O)C(O)C(O)C1O | [chemical structure] | C1CCC2C(C1)CCC1 CCCCC12 | [chemical structure] |
| 40 | 4.554e-06 | CC(C)NC(═O)COc1cccc(C2═NC(Nc3 ccc4n[nH]cc4c3)c3ccccc3[N]2)c1 | [chemical structure] | c1ccc2n[nH]cc2c1 | [chemical structure] |
| 41 | 4.554e-06 | CC[C@]1(C[C@]23CC[C@]4(C)C(C5 ═CC(═O)OC5)CC[C@]4(O)C2C3)CC C(OC2CC(O)C(OC3CC(O)C(OC4CC (O)C(O)C(C)O4)C(C)O3)C(C)O2)C1 | [chemical structure] | C1CCC2CCCC2C1 | [chemical structure] |
| 42 | 4.554e-06 | Cc1ccc(NC(═O)C2(c3ccc4c(c3)OC(F) (F)O4)CC2)nc1-c1cccc(C(═O)O)c1 CCCc1cc(C)[nH]c(═O)c1CNC(═O)c1 c | [chemical structure] | c1cc2c(cc1C1CC1)O CO2 | [chemical structure] |
| 43 | 4.554e-06 | c(- c2ccc(N3CCN(C(C)C)CC3)nc2)cc2c1 cnn2C(C)C | [chemical structure] | c1ccc2[nH]ncc2c1 | [chemical structure] |
| 44 | 4.554e-06 | CC1(C)CCC(CN2CCN(c3ccc(C(═O)N S(═O)(═O)c4ccc(NCC5CCOCC5)c([N+] (═O)[O-])c4)c(Oc4cnc5[nH]ccc5c4)c 3)CC2)═C(c2ccc(CI)cc2)C1 | [chemical structure] | c1cnc2[nH]ccc2c1 | [chemical structure] |
| 45 | 5.354e-06 | COC1CN(C2CC(OC3C[C@](O)(C(═ O)CO)Cc4c(O)c5c(c(O)c43)C(═O)c3c (OC)cccc3C5═O)OC(C)C2O)CCO1 | [chemical structure] | O═C1c2ccccc2C(═O) c2cc3c(cc21)CCCC3 OC1CCCCO1 | [chemical structure] |
| 46 | 5.354e-06 | Cc1cc(Nc2ncnc3ccc(NC4═NC(C)(C) CO4)cc23)ccc1Oc1ccn2ncnc2c1 | [chemical structure] | c1ccc2c(Nc3ccc(Oc4 ccn5ncnc5c4)cc3)nc nc2c1 | [chemical structure] |
| 47 | 5.354e-06 | CC1CCC2C(C═C(C)C3CC(═O)CC[C @@]23C)C1CCC(OC(C)═O)C(C)═O | [chemical structure] | C1═CC2CCCCC2CC 1 | [chemical structure] |
| 48 | 5.354e-06 | Cc1[nH]c(/C═C2\C(═O)Nc3ccc(S(═O) (═O)N(C)c4cccc(CI)c4)cc32)c(C)c1C (═O)N1CCN(C)CC1 | [chemical structure] | C═C1C(═O)Nc2cccc c21 | [chemical structure] |
| 49 | 5.354e-06 | CC(═O)[C@]12O[C@](C)(c3ccccc3) OC1CC1C3CCC4CC(═O)CC[C@@]4 (C)C3CC[C@@]12C | [chemical structure] | O═C1CCC2C(CCC3 C2CCC2C3CC3OCO C32)C1 | [chemical structure] |
| 50 | 5.354e-06 | CC(CCCC(O)(C(F)(F)F)C(F)(F)F)C1 CCC2/C(═C/C═C3/CC(O)CC(O)C3═ C)CCC[C@]12C | [chemical structure] | C═C1CCCC2CCCC1 2 | [chemical structure] |
| 51 | 6.295e-06 | COC1CC(O)C(OC2OC(COS([O])([O]) O)C(OC3OC(C(═O)O)C(OC4OC(CO S([O])([O])O)C(O)C(O)C4NS([O])([O]) O)C(O)C3O)C(OS([O])([O])O)C2NS ([O])([O])O)C(C(═O)O)O1 | [chemical structure] | C1CCC(OC2CCCOC 2)OC1 | [chemical structure] |
| 52 | 6.295e-06 | Cn1cc( c2cc3c(N4CCN(c5ncc([C@@](C)(N)c 6ccc(F)cc6)cn5)CC4)ncnn3c2)cn1 | [chemical structure] | c1ccc(Cc2cnc(N3CC N(c4ncnn5cc(- c6cn[nH]c6)cc45)CC 3)nc2)cc1 | [chemical structure] |
| 53 | 6.295e-06 | CCOC(═O)O[C@]([O])(COC(═O)CC) C1C[C@@]12C1CC(O)C3C(CCC4C C(═O)CC[C@]43C)C12 | [chemical structure] | C1CCC2C(C1)C21C C1 | [chemical structure] |
| 54 | 6.295e-06 | COc1cnc(N2CN═C(C)[N]2)c2c1c(C(═ O)C(═O)N1CCN(C(═O)c3ccccc3)CC1 )cn2COP(═O)(O)O | [chemical structure] | O═C(C(═O)N1CCN (C(═O)c2ccccc2)CC1) c1c[nH]c2c(N3CN═C [N]3)nccc12 | [chemical structure] |
| 55 | 6.295e-06 | CCN1CCC(N(C)C2N═C(C3CCCCC3) [N]c3cc(OCCCN4CCCC4)c(OC)cc32) CC1 | [chemical structure] | C1═NCc2ccccc2[N]1 | [chemical structure] |
| 56 | 6.295e-06 | O═C(OC(C(F)(F)F)C(F)(F)F)N1CCC (C(O)(c2ccc3c(c2)OCO3)c2ccc3c(c2) OCO3)CC1 | [chemical structure] | c1cc2c(cc1C(c1ccc3 c(c1)OCO3)C1CCNC C1)OCO2 | [chemical structure] |
| 57 | 6.295e-06 | CCC(CC(C)F)C1C(C(C)N2[N]C(c3cc c(OC(C)C)c(F)c3)c3c(N)ncnc32)Oc2c cc(F)cc2C1═O | [chemical structure] | c1ncc2c(n1)N[N]C2 | [chemical structure] |
| 58 | 7.400e-06 | CC(C)n1c(═O)n(C)c2cnc3cc(F)c(- c4ccc(OCCCN5CCCCC5)nc4)cc3c21 | [chemical structure] | O═c1[nH]c2cnc3ccc(- (c4cccnc4)cc3c2[nH]1 | [chemical structure] |
| 59 | 7.400e-06 | CCC1OC(═O)C(C)C(═O)C(C)C(OC2 OC(C)CC(N(C)C)C2O)[C@](C)(OC)C C(C)C(═O)C(C)C2N(CCCCn3cnc(- c4cccnc4)c3)C(═O)O[C@]12C | [chemical structure] | O═C1CCCCCC(═O) CC2NC(═O)OC2CO C(═O)C1 | [chemical structure] |
| 60 | 7.400e-06 | C[C@]12CCC(═O)CC1CCC1C3C[C @@]4(C)[C@@](O)([C@@]3(C)CC (O)[C@]12F)[C@]4([O])CO | [chemical structure] | O═C1CCC2C(CCC3 CCCCC32)C1 | [chemical structure] |
| 61 | 8.701e-06 | O═C(Nc1cc(-c2ccccc2)nn1- c1ccccc1F)c1ccc([N+](═O)[O-])cc1 | [chemical structure] | c1ccc(- c2cc[nH]n2)cc1 | [chemical structure] |
| 62 | 8.701e-06 | O═C(/C═C/N1CC2CC1CN2c1ccccnl) c1ccccc1O | [chemical structure] | C1NC2CNC1C2 | [chemical structure] |
| 63 | 8.701e-06 | COc1ccc(N(C(═O)Oc2c(C)cccc2C)c2 ccnc(Nc3ccc(N4CCN(C)CC4)cc3)n2) c(OC)c1 | [chemical structure] | c1ccc(N2CCNCC2)c c1 | [chemical structure] |
| 64 | 8.701e-06 | NC(═O)c1ccc(N(C(N)═O)c2c(F)cccc2 F)nc1-c1ccc(F)cc1F | [chemical structure] | c1ccc(-c2ccccn2)cc1 | [chemical structure] |
| 65 | 8.701e-06 | COc1ccc(C2[N]C(c3ccc(CI)cc3)C(c3c cc(CI)cc3)N2C(═O)N2CCNC(═O)C2)c (OC(C)C)c1 | [chemical structure] | c1ccc(C2[N]C(c3cccc c3)C(c3ccccc3)N2)cc 1 | [chemical structure] |
| 66 | 1.023e-05 | CC1CN(c2ccc(NC(═O)c3cccc(- c4ccc(OC(F)(F)F)cc4)c3C)cn2)CC(C) O1 | [chemical structure] | c1ccc(N2CCOCC2)n c1 | [chemical structure] |
| 67 | 1.203e-05 | COc1cc2nccc(Oc3ccc(NC(═O)c4cn(C (C)C)c(═O)n (c5ccc(F)cc5)c4═O)cc3F)c2cc1OC | [chemical structure] | c1ccc(Oc2ccnc3cccc c23)cc1 | [chemical structure] |

[chemical structure]

TABLE 14
Antibody modulators targeting FNIP1 and/or FNIP2

| Number | Catalogue ID | Vendor | Target |
|---|---|---|---|
| 1 | ABIN5066851 | antibodies-online.com | FNIP1 |
| 2 | ABIN5066854 | antibodies-online.com | FNIP1 |
| 3 | ABIN5066849 | antibodies-online.com | FNIP1 |
| 4 | ABIN5066844 | antibodies-online.com | FNIP1 |
| 5 | ABIN5066843 | antibodies-online.com | FNIP1 |
| 6 | ABIN5066846 | antibodies-online.com | FNIP1 |
| 7 | ABIN5066845 | antibodies-online.com | FNIP1 |
| 8 | ABIN5066847 | antibodies-online.com | FNIP1 |
| 9 | ABIN5066842 | antibodies-online.com | FNIP1 |
| 10 | ABIN5066841 | antibodies-online.com | FNIP1 |
| 11 | ABIN5066840 | antibodies-online.com | FNIP1 |
| 12 | ABIN5066853 | antibodies-online.com | FNIP1 |
| 13 | ABIN5066852 | antibodies-online.com | FNIP1 |
| 14 | ABIN5066848 | antibodies-online.com | FNIP1 |
| 15 | ABIN5066841 | antibodies-online.com | FNIP1 |
| 16 | ABIN5066840 | antibodies-online.com | FNIP1 |
| 17 | ABIN5066853 | antibodies-online.com | FNIP1 |
| 18 | ABIN540656 | antibodies-online.com | FNIP1 |
| 19 | ABIN238670 | antibodies-online.com | FNIP1 |
| 20 | ABIN6930398 | antibodies-online.com | FNIP1 |
| 21 | ABIN6930396 | antibodies-online.com | FNIP1 |
| 22 | ABIN6930397 | antibodies-online.com | FNIP1 |
| 23 | ABIN6930395 | antibodies-online.com | FNIP1 |
| 24 | ABIN6930394 | antibodies-online.com | FNIP1 |
| 25 | ABIN6930393 | antibodies-online.com | FNIP1 |
| 26 | ABIN5514775 | antibodies-online.com | FNIP1 |
| 27 | ABIN5697699 | antibodies-online.com | FNIP1 |
| 28 | ABIN6081543 | antibodies-online.com | FNIP1 |
| 29 | ABIN6081545 | antibodies-online.com | FNIP1 |
| 30 | ABIN5066850 | antibodies-online.com | FNIP1 |
| 31 | ABIN6081547 | antibodies-online.com | FNIP1 |
| 32 | ABIN6081549 | antibodies-online.com | FNIP1 |
| 33 | ABIN1042594 | antibodies-online.com | FNIP1 |
| 34 | ABIN2268375 | antibodies-online.com | FNIP1 |
| 35 | ABIN2268376 | antibodies-online.com | FNIP1 |
| 36 | ABIN2268377 | antibodies-online.com | FNIP1 |
| 37 | ABIN2268378 | antibodies-online.com | FNIP1 |
| 38 | ABIN2268380 | antibodies-online.com | FNIP1 |
| 39 | ABIN2268379 | antibodies-online.com | FNIP1 |
| 40 | ABIN341163 | antibodies-online.com | FNIP1 |
| 41 | abx917051 | abbexa.com | FNIP1 |
| 42 | abx917052 | abbexa.com | FNIP1 |
| 43 | abx313611 | abbexa.com | FNIP1 |
| 44 | abx233179 | abbexa.com | FNIP1 |
| 45 | abx432703 | abbexa.com | FNIP1 |
| 46 | abx448561 | abbexa.com | FNIP1 |
| 47 | abx447818 | abbexa.com | FNIP1 |
| 48 | abx447819 | abbexa.com | FNIP1 |
| 49 | abx447810 | abbexa.com | FNIP1 |
| 50 | abx447811 | abbexa.com | FNIP1 |
| 51 | abx447813 | abbexa.com | FNIP1 |
| 52 | abx313614 | abbexa.com | FNIP1 |
| 53 | abx447820 | abbexa.com | FNIP1 |
| 54 | abx313613 | abbexa.com | FNIP1 |
| 55 | abx447821 | abbexa.com | FNIP1 |
| 56 | abx313612 | abbexa.com | FNIP1 |
| 57 | abx447822 | abbexa.com | FNIP1 |
| 58 | abx447824 | abbexa.com | FNIP1 |
| 59 | abx447825 | abbexa.com | FNIP1 |
| 60 | abx964266 | abbexa.com | FNIP1 |
| 61 | abx387393 | abbexa.com | FNIP1 |
| 62 | abx981023 | abbexa.com | FNIP1 |
| 63 | abx524104 | abbexa.com | FNIP1 |
| 64 | LS-C82348 | LifeSpan BioSciences, Inc. | FNIP1 |
| 65 | LS-C61738 | LifeSpan BioSciences, Inc. | FNIP1 |
| 66 | LS-C665632 | LifeSpan BioSciences, Inc. | FNIP1 |
| 67 | LS-C677965 | LifeSpan BioSciences, Inc. | FNIP1 |
| 68 | LS-C677967 | LifeSpan BioSciences, Inc. | FNIP1 |
| 69 | LS-C677969 | LifeSpan BioSciences, Inc. | FNIP1 |
| 70 | LS-C677968 | LifeSpan BioSciences, Inc. | FNIP1 |
| 71 | LS-C763277 | LifeSpan BioSciences, Inc. | FNIP1 |
| 72 | LS-C773233 | LifeSpan BioSciences, Inc. | FNIP1 |
| 73 | LS-C773235 | LifeSpan BioSciences, Inc. | FNIP1 |
| 74 | LS-C773234 | LifeSpan BioSciences, Inc. | FNIP1 |
| 75 | LS-C773237 | LifeSpan BioSciences, Inc. | FNIP1 |
| 76 | LS-C773239 | LifeSpan BioSciences, Inc. | FNIP1 |
| 77 | LS-C773240 | LifeSpan BioSciences, Inc. | FNIP1 |
| 78 | LS-C773238 | LifeSpan BioSciences, Inc. | FNIP1 |
| 79 | LS-C773236 | LifeSpan BioSciences, Inc. | FNIP1 |
| 80 | LS-C750519 | LifeSpan BioSciences, Inc. | FNIP1 |
| 81 | LS-C775781 | LifeSpan BioSciences, Inc. | FNIP1 |
| 82 | LS-C775783 | LifeSpan BioSciences, Inc. | FNIP1 |
| 83 | LS-C775784 | LifeSpan BioSciences, Inc. | FNIP1 |
| 84 | LS-C775786 | LifeSpan BioSciences, Inc. | FNIP1 |
| 85 | LS-C775787 | LifeSpan BioSciences, Inc. | FNIP1 |
| 86 | LS-C775788 | LifeSpan BioSciences, Inc. | FNIP1 |
| 87 | LS-C775785 | LifeSpan BioSciences, Inc. | FNIP1 |
| 88 | LS-C775789 | LifeSpan BioSciences, Inc. | FNIP1 |
| 89 | LS-C775780 | LifeSpan BioSciences, Inc. | FNIP1 |
| 90 | PA5-77778 | Invitrogen Antibodies | FNIP1 |
| 91 | PA5-71423 | Invitrogen Antibodies | FNIP1 |
| 92 | PA5-64359 | Invitrogen Antibodies | FNIP1 |
| 93 | PA5-64453 | Invitrogen Antibodies | FNIP1 |
| 94 | 19847-1-AP | Proteintech Group | FNIP1 |
| 95 | 28380-1-AP | Proteintech Group | FNIP1 |
| 96 | NB100-93396 | Novus Biologicals | FNIP1 |
| 97 | NBP2-49544 | Novus Biologicals | FNIP1 |
| 98 | NBP2-49647 | Novus Biologicals | FNIP1 |
| 99 | NBP2-87460 | Novus Biologicals | FNIP1 |
| 100 | GTX82555 | GeneTex | FNIP1 |
| 101 | GTX88818 | GeneTex | FNIP1 |
| 102 | 110739 | NovoPro Biosciences Inc. | FNIP1 |
| 103 | orb156915 | Biorbyt | FNIP1 |
| 104 | orb45245 | Biorbyt | FNIP1 |
| 105 | orb448990 | Biorbyt | FNIP1 |
| 106 | orb470827 | Biorbyt | FNIP1 |
| 107 | orb19734 | Biorbyt | FNIP1 |
| 108 | orb45246 | Biorbyt | FNIP1 |
| 109 | orb45247 | Biorbyt | FNIP1 |
| 110 | orb45248 | Biorbyt | FNIP1 |
| 111 | orb462210 | Biorbyt | FNIP1 |
| 112 | orb486703 | Biorbyt | FNIP1 |
| 113 | orb543061 | Biorbyt | FNIP1 |
| 114 | orb55594 | Biorbyt | FNIP1 |
| 115 | orb55595 | Biorbyt | FNIP1 |
| 116 | orb55596 | Biorbyt | FNIP1 |
| 117 | orb55597 | Biorbyt | FNIP1 |
| 118 | orb55598 | Biorbyt | FNIP1 |
| 119 | orb55599 | Biorbyt | FNIP1 |
| 120 | orb55600 | Biorbyt | FNIP1 |
| 121 | orb55601 | Biorbyt | FNIP1 |
| 122 | orb55602 | Biorbyt | FNIP1 |
| 123 | orb55603 | Biorbyt | FNIP1 |
| 124 | orb55604 | Biorbyt | FNIP1 |
| 125 | orb55605 | Biorbyt | FNIP1 |
| 126 | orb55606 | Biorbyt | FNIP1 |
| 127 | orb55607 | Biorbyt | FNIP1 |
| 128 | orb55608 | Biorbyt | FNIP1 |
| 129 | orb55609 | Biorbyt | FNIP1 |
| 130 | orb55610 | Biorbyt | FNIP1 |
| 131 | orb55611 | Biorbyt | FNIP1 |
| 132 | PAB12367 | Abnova Corporation | FNIP1 |
| 133 | PAB7550 | Abnova Corporation | FNIP1 |
| 134 | H00096459-K | Abnova Corporation | FNIP1 |
| 135 | HPA068099 | Atlas Antibodies | FNIP1 |
| 136 | HPA071213 | Atlas Antibodies | FNIP1 |
| 137 | CBMAB-F0933-CQ | Creative Biolabs | FNIP1 |
| 138 | MOR-1329 | Creative Biolabs | FNIP1 |
| 139 | DCABH-15436 | Creative Diagnostics | FNIP1 |
| 140 | CPBT-33934RH | Creative Diagnostics | FNIP1 |
| 141 | DPAB-DC3873 | Creative Diagnostics | FNIP1 |
| 142 | STJ117747 | St. John's Laboratory | FNIP1 |
| 143 | STJ71460 | St. John's Laboratory | FNIP1 |
| 144 | ab13469 | RabMAbs | FNIP1 |
| 145 | MBS2529883 | MyBioSource | FNIP1 |
| 146 | MBS421591 | MyBioSource | FNIP1 |
| 147 | AP03045SU-N | Acris Antibodies GmbH | FNIP1 |
| 148 | OAEB00546 | Aviva Systems Biology | FNIP1 |
| 149 | EB08326 | Everest Biotech | FNIP1 |
| 150 | AF2703a | Abgent | FNIP1 |
| 151 | APG00517G | Leading Biology | FNIP1 |
| 152 | 46-659 | ProSci | FNIP1 |
| 153 | abx917053 | abbexa.com | FNIP2 |
| 154 | abx917054 | abbexa.com | FNIP2 |
| 155 | abx961571 | abbexa.com | FNIP2 |
| 156 | abx524105 | abbexa.com | FNIP2 |
| 157 | abx983570 | abbexa.com | FNIP2 |
| 158 | abx524106 | abbexa.com | FNIP2 |
| 159 | ABIN952349 | antibodies-online.com | FNIP2 |
| 160 | ABIN615692 | antibodies-online.com | FNIP2 |
| 161 | ABIN3092610 | antibodies-online.com | FNIP2 |
| 162 | ABIN3135978 | antibodies-online.com | FNIP2 |
| 163 | ABIN6656599 | antibodies-online.com | FNIP2 |
| 164 | ABIN5578275 | antibodies-online.com | FNIP2 |
| 165 | ABIN499853 | antibodies-online.com | FNIP2 |
| 166 | ABIN5578273 | antibodies-online.com | FNIP2 |
| 167 | ABIN1734392 | antibodies-online.com | FNIP2 |
| 168 | ABIN1030400 | antibodies-online.com | FNIP2 |
| 169 | ABIN6656600 | antibodies-online.com | FNIP2 |
| 170 | ABIN499855 | antibodies-online.com | FNIP2 |
| 171 | ABIN1734393 | antibodies-online.com | FNIP2 |
| 172 | ABIN1031382 | antibodies-online.com | FNIP2 |
| 173 | ABIN2721270 | antibodies-online.com | FNIP2 |
| 174 | ABIN1382786 | antibodies-online.com | FNIP2 |
| 175 | ABIN1382790 | antibodies-online.com | FNIP2 |
| 176 | ABIN2861625 | antibodies-online.com | FNIP2 |
| 177 | ABIN2861626 | antibodies-online.com | FNIP2 |
| 178 | ABIN1812731 | antibodies-online.com | FNIP2 |
| 179 | ABIN2268382 | antibodies-online.com | FNIP2 |
| 180 | ABIN2268387 | antibodies-online.com | FNIP2 |
| 181 | ABIN2268389 | antibodies-online.com | FNIP2 |
| 182 | ABIN2268391 | antibodies-online.com | FNIP2 |
| 183 | ABIN2268390 | antibodies-online.com | FNIP2 |
| 184 | ABIN2268388 | antibodies-online.com | FNIP2 |
| 185 | ABIN2268392 | antibodies-online.com | FNIP2 |
| 186 | ABIN2602382 | antibodies-online.com | FNIP2 |
| 187 | ABIN1896209 | antibodies-online.com | FNIP2 |
| 188 | ABIN1896208 | antibodies-online.com | FNIP2 |
| 189 | ABIN1896210 | antibodies-online.com | FNIP2 |
| 190 | ABIN1896211 | antibodies-online.com | FNIP2 |
| 191 | ABIN1896213 | antibodies-online.com | FNIP2 |
| 192 | ABIN1896212 | antibodies-online.com | FNIP2 |
| 193 | LS-B4600 | LifeSpan BioSciences, Inc. | FNIP2 |
| 194 | LS-B4598 | LifeSpan BioSciences, Inc. | FNIP2 |
| 195 | LS-C166200 | LifeSpan BioSciences, Inc. | FNIP2 |
| 196 | LS-C235336 | LifeSpan BioSciences, Inc. | FNIP2 |
| 197 | LS-C235337 | LifeSpan BioSciences, Inc. | FNIP2 |
| 198 | LS-C235338 | LifeSpan BioSciences, Inc. | FNIP2 |
| 199 | LS-C235340 | LifeSpan BioSciences, Inc. | FNIP2 |
| 200 | LS-C235339 | LifeSpan BioSciences, Inc. | FNIP2 |
| 201 | LS-C321416 | LifeSpan BioSciences, Inc. | FNIP2 |
| 202 | LS-C248999 | LifeSpan BioSciences, Inc. | FNIP2 |
| 203 | PAB16703 | Abnova Corporation | FNIP2 |
| 204 | PAB16707 | Abnova Corporation | FNIP2 |
| 205 | PAB23979 | Abnova Corporation | FNIP2 |
| 206 | H00057600-B01P | Abnova Corporation | FNIP2 |
| 207 | orb28569 | Biorbyt | FNIP2 |
| 208 | orb75149 | Biorbyt | FNIP2 |
| 209 | orb89825 | Biorbyt | FNIP2 |
| 210 | orb89827 | Biorbyt | FNIP2 |
| 211 | orb75153 | Biorbyt | FNIP2 |
| 212 | orb156916 | Biorbyt | FNIP2 |
| 213 | orb28568 | Biorbyt | FNIP2 |
| 214 | orb448991 | Biorbyt | FNIP2 |
| 215 | orb470828 | Biorbyt | FNIP2 |
| 216 | orb462211 | Biorbyt | FNIP2 |
| 217 | orb486704 | Biorbyt | FNIP2 |
| 218 | AP51694PU-N | OriGene | FNIP2 |
| 219 | AP23472PU-N | OriGene | FNIP2 |
| 220 | AP23474PU-N | OriGene | FNIP2 |
| 221 | TA306730 | OriGene | FNIP2 |
| 222 | TA306734 | OriGene | FNIP2 |
| 223 | AP51694PU-N | Acris Antibodies GmbH | FNIP2 |
| 224 | AP51694PU-N | Acris Antibodies GmbH | FNIP2 |
| 225 | AP51694PU-N | Acris Antibodies GmbH | FNIP2 |
| 226 | AP51694PU-N | Acris Antibodies GmbH | FNIP2 |
| 227 | AP51694PU-N | Acris Antibodies GmbH | FNIP2 |
| 228 | AP51694PU-N | Acris Antibodies GmbH | FNIP2 |
| 229 | AP51694PU-N | Acris Antibodies GmbH | FNIP2 |
| 230 | PA5-24150 | Invitrogen Antibodies | FNIP2 |
| 231 | PA5-20690 | Invitrogen Antibodies | FNIP2 |
| 232 | PA5-20691 | Invitrogen Antibodies | FNIP2 |
| 233 | PA5-111162 | Invitrogen Antibodies | FNIP2 |
| 234 | PA5-111693 | Invitrogen Antibodies | FNIP2 |
| 235 | GTX85348 | GeneTex | FNIP2 |
| 236 | GTX85347 | GeneTex | FNIP2 |
| 237 | LS-B4598 | LifeSpan BioSciences, Inc. | FNIP2 |
| 238 | LS-B4600 | LifeSpan BioSciences, Inc. | FNIP2 |
| 239 | LS-C166200 | LifeSpan BioSciences, Inc. | FNIP2 |
| 240 | LS-C235336 | LifeSpan BioSciences, Inc. | FNIP2 |
| 241 | LS-C235337 | LifeSpan BioSciences, Inc. | FNIP2 |
| 242 | LS-C235338 | LifeSpan BioSciences, Inc. | FNIP2 |
| 243 | LS-C235339 | LifeSpan BioSciences, Inc. | FNIP2 |
| 244 | LS-C235340 | LifeSpan BioSciences, Inc. | FNIP2 |
| 245 | LS-C248999 | LifeSpan BioSciences, Inc. | FNIP2 |
| 246 | LS-C321416 | LifeSpan BioSciences, Inc. | FNIP2 |
| 247 | LS-C553194 | LifeSpan BioSciences, Inc. | FNIP2 |
| 248 | LS-C572845 | LifeSpan BioSciences, Inc. | FNIP2 |
| 249 | LS-C592499 | LifeSpan BioSciences, Inc. | FNIP2 |
| 250 | LS-C612149 | LifeSpan BioSciences, Inc. | FNIP2 |
| 251 | LS-C631799 | LifeSpan BioSciences, Inc. | FNIP2 |
| 252 | OAAB00671 | Aviva Systems Biology | FNIP2 |
| 253 | 134796 | NovoPro Bioscience Inc. | FNIP2 |
| 254 | NBP1-93724 | Novus Biologicals | FNIP2 |
| 255 | NBP2-68936 | Novus Biologicals | FNIP2 |
| 256 | 600-401-BF8 | Rockland Immunochemicals, | FNIP2 |
| | | Inc. | |
| 257 | 600-401-BF9 | Rockland Immunochemicals, | FNIP2 |
| | | Inc. | |
| 258 | APS10854 | Abgent | FNIP2 |
| 259 | APS10858 | Abgent | FNIP2 |
| 260 | ALS13522 | Abgent | FNIP2 |
| 261 | 5045 | ProSci | FNIP2 |
| 262 | 5057 | ProSci | FNIP2 |
| 263 | 57612 | Cell Signaling Technology, | FNIP2 |
| | | Inc. | |
| 264 | HPA042779 | Atlas Antibodies | FNIP2 |
| 265 | HPA072420 | Atlas Antibodies | FNIP2 |
| 266 | MBS9209931 | MyBioSource | FNIP2 |
| 267 | MBS150131 | MyBioSource | FNIP2 |
| 268 | 35705 | United States Biological | FNIP2 |
| 269 | 035705-AP | United States Biological | FNIP2 |
| 270 | 035705-APC | United States Biological | FNIP2 |
| 271 | 035705-Biotin | United States Biological | FNIP2 |
| 272 | 035705-FITC | United States Biological | FNIP2 |
| 273 | 035705-ML405 | United States Biological | FNIP2 |
| 274 | 035705-ML490 | United States Biological | FNIP2 |
| 275 | 035705-ML550 | United States Biological | FNIP2 |
| 276 | 035705-ML650 | United States Biological | FNIP2 |
| 277 | 035705-ML750 | United States Biological | FNIP2 |
| 278 | 035705-PE | United States Biological | FNIP2 |
| 279 | 35705 | United States Biological | FNIP2 |
| 280 | 035705-HRP | United States Biological | FNIP2 |
| 281 | 119-14583 | RayBiotech, Inc. | FNIP2 |
| 282 | 119-14585 | RayBiotech, Inc. | FNIP2 |
| 283 | bs-13194R | Bioss | FNIP2 |
| 284 | bs-13194R-Biotin | Bioss | FNIP2 |
| 285 | bs-13194R-HRP | Bioss | FNIP2 |
| 286 | bs-13194R-A350 | Bioss | FNIP2 |
| 287 | bs-13194R-A488 | Bioss | FNIP2 |
| 288 | bs-13194R-A555 | Bioss | FNIP2 |
| 289 | bs-13194R-A647 | Bioss | FNIP2 |
| 290 | bs-13194R-Cy3 | Bioss | FNIP2 |
| 291 | bs-13194R-Cy5 | Bioss | FNIP2 |
| 292 | bs-13194R-Cy5.5 | Bioss | FNIP2 |
| 293 | bs-13194R-Cy7 | Bioss | FNIP2 |
| 294 | bs-13194R-FITC | Bioss | FNIP2 |
| 295 | 254026 | Abbiotec | FNIP2 |
| 296 | 254030 | Abbiotec | FNIP2 |
| 297 | DPABH-10189 | Creative Diagnostics | FNIP2 |
| 298 | DPABH-10209 | Creative Diagnostics | FNIP2 |
| 299 | AMM04573G | Leading Biology | FNIP2 |
| 300 | AMM04574G | Leading Biology | FNIP2 |
| 301 | AMM04572G | Leading Biology | FNIP2 |
| 302 | CBMAB-CP073-LY | Creative Biolabs | FNIP2 |
| 303 | SAB3500007 | Sigma-Aldrich | FNIP2 |
| 304 | SAB3500010 | Sigma-Aldrich | FNIP2 |

The application's sequence listing, which the Patent Office published only in electronic form, follows.

SEQUENCE LISTING (1494 sequences)

SEQ ID NO: 1 - DNA, 143001 bp, Homo sapiens
  source 1..143001: mol_type = genomic DNA
gctggctagagctgtctcccagaacttttttggctaggatttttgtatactttaaaaatccaaaggaggaggtgtggccagaaccaggatgaggaagaatgtgatgctgagaggaagcacagggagaaagaggggagaagggaagcattttggttccttttgtctcctttaactgaagtcctggctttaatagtttaaaatacacactcttcctttatagttgcctagtcaaaaccaaaattgaagatgatggctagagcaggttatgattttttaattgcctcttttggatgatcttgtctatttggactgggttggaactgaaagagtcctaggaagtgaggaatgaggcacaatatgtcaaattcctcttctatatgcagttacaaaagctgctaggctcatgaggaacatgcagattttagtctggagaataaaggacattttctgaccaaggatggagtaaggaaaggtggtgagttgctggccacagtatgacctgggactgtatctgaaagtcacaacgtataaagccaataccttctatatagcatcctgaccaacactggcagccctatgaggtaaaggccttcagcaaacagaaatagcaaagttgcaaattagggttctgtgtacactcaattgtgcaaaaggatgattgctcatcaggataaacacttaatccaccattttaacagtaaaagtccgaaggaaacaaatgactaagtttccatttctaccacctttctcttacctttgtgaaatttcagcacattattcacagctagttcccaaccaagtccagaaactaacacaattaaaaaaagaaaatgcaaagtaaaataggcccagaataggttcttttgattacttatgtttttggaaatatattttcctttttgagtctccaagagtcctcctctcaacaagtgtaagagagcccaggtgagtcactgttcactactcatggagaagctagaagaggcatggttggggtcttactaactttatctctatttcccatcatcggaaaaattcgtgaagcccaacgctctaaaacatagattaagaagttgctttgagtctggtaacgtgtcctacactggctgtttagagccctgcaccaccaaggattaaattccaaaggggactggggtgggacagggcaggaaagcggactcaaacacatgaactcctcccttcctcaaaccaaatatctgctgctgatatgccttgattgactgttaaatatgtattaggaaaaacaatcccttgctataaaatatcttaagtttctaaatctatgtagtgagttctgtgtgtgtgtgtgtgtgtgtgtgtgtgtgtgtgtgtgtatgttttaaaggggggacttaatatttcaaatgcaacttcttatataaccatggtatggtggcccaagacgccaaacagaacaaatgatttggataaacagtttaaattttgtgaaagcctggaggaatcgaatttggacatggaggaaacctgacaaaaccttgggtgctatgtgattcaaatcacagcccaccgaagcggccaccgcgcgtaccaagccttcccccctagcatacgccttctgtgaacgggctcttgtacctgaacaaagcgaggacccaagttcaggggctttgtctctaaagaacaaagatcggcctagctgcatgctcgctgtgcgaaagaacccaggctccgtgggaaccccacgccactcgcggagctgcgccccggcggccgccctcgcccctcgggcccctttaagtgccgcgcctgcccccgtccgcgtcccccgcgtgcccggagtactgggccgcccgcccgctcctggccgcacctcccacctcccgcctcccgccggggttacgtgagcccggggcgggcggccgccgggccaatggccgccgccggggccgccgcgctcctcccgcgccgccgccgccgccgtggggctgcgggctcctcccgcaggagataactgtcagcgcgcgaggcggtggcgggccggctcagtcatatgaccggcagccggcggctccggcgccgagcagagttactcagtcgcagcggccccgcgctcccgcaaggctgggcggccgcgccgccgcgatggccccgccaccgcggccgccgcccccggctgcgcgctgagccgccggccccccgagcgccacggccggagctgcggcggcggcatcatggccccgaccctgctccagaagctcttcaacaaaaggggcagcagcggcagctccgcggcggcgtctgcccagggcagggctcctaaggaaggacccgcctttaggtgagggggcgccggggggcaattctggcgcgggacccgagttggcttcggtgctcgccggggaggggacgggtaggggaaagggaagggactgtccaggacggcgctgcctatcgccggcacctggtcccgggcttgtcagcgtggacgcgcctgatccgagtgtggctccggaccctccgtgacccttcctcccgctctttctccacaactcagggtccttccccatttcagagttctcttgtgttccttggggttcccgggcgtgcgctgtgcttggctgtggcgaccggagattctccggttattggggtgaaccccttccgggcagagccgcctgggcacctctgcgggcccagcaaagctgtgagctgtcattttgagggcagctccaacctattgtgtacgtgacagtgttttgaagttctgaaggagcaacagtcacgaaaaaggcatctttcttctttcttgccatatatgacaagctctcaaacggatgaatgaaagtatgtaatttccacatcatgtggaaggttgatgccgcatgatgtgtggaaagggggagtaagatgcaattatgaaatttccgagatttcaattgatcaaagctgatatgtatatttaatagatttgatctctcgaacacatacctttgaatattgatagcatttatggagagcttactacctaaaatgctttatgttgatttctgtcgtttacttttctgacaatgcggtgaggtgggtgctattataattcccattttacaggtgaggaaacttaaagtcacagataacttaggcggcttgcccaaaatccagctgtcagtggtagagcctgtgttttgacccaagcagtttgaccacagattccagtctttaaaatccctatgctattctgatttcaagggctaacttttaaaagacgccttaaaatgtcctatattgcctttgagcacaggtatgttgagaagtttatttaacaatttttcaacacattttaaaattgagcaccaactcccaattctgacactatgctaggtgctttttggccaaaatgtcttgcaaaaacagttcactgttaaacagatctagacccagtataataaacctttaaaagtttcaagtgaaactttgaaataaattctggattaagttttatgttctagattttgcttttcttgaattccatcatttaaaacagtctctcactgtggtcatgtgaaaattaaacgtgtgtgtgtgtgtgcacgcgcgctcatggaaggcatattgtgaggaccttaaactccccaagttaaattctcatgttttctttaggctaacaagccttataatttgagtgggaattctatgccttttgttaggctgagtattagtgatgccatgtaccttctcagaatggtagaattacttcggacctaaggtgtgtaatttcgtcccttccctccctgtaacccagactccatcaggggtacaaagcctggagcggaaggagcatgttacaggtgtctgtactttgacagctcttgccaaggacatttaaagccatttgaatgcaggaggagatagtggcggttacttgtcattgttttctgtgctccttgcctaattgcctaccaccatttccgctatccacaagtttaactgagtgtatttgaacaaaaaaaatatggctatatttagggttttgggccatattagggaaattgattcccacttcatgggaacattttcagtagtgttctgacttctcatttgtgtataatgaagaacagaaaatcgtgccaagtacggtcttttttttgacctcattgggattttctacaagaatttgagatcgatgtttttggagaatttggggatcccagttgaacatcctacttgatgagggcccccttcaatagtgtccctgatagaggtcaccatggaaaagaaagtaaagtagcagatgtgagcaaggatgctggacgatgggaacaaaccatcctgtgctcaccagactgacaaaggagaccccaagcaagtctttccttttgctcttttcacctggcttaattctaagatgctgtgtagctggcctgggaaaagcttccaggaaaatttttctctctacctaaaaaattgtgaacctgtgtttcattttacccagattttgccaaataggagttggtatgtactttgaggggaacaaggtgccttattgcagggcattagctgcccttgggaactaccttgtagttaaatagagttttagaagtgaagctaaaacccttagattaaaaatcgagtattcctaacatgaatttgtattctttagtgcatttaagtacaggatgtaacttgtttatctggagattgaaaattcactgaggattcaggtagacttttggggcagttttgtagtgtatatgggggagaatctaagatccaactttttgtttgtttgttttagagtttgtatatcttctgtttccatgatggactttcactggttattttaaacttctcttctcagaattgttttgcccttgttgttagtctttttactcttgtgcacttcctagtcccttcgctgggcttatgactgttctcattcctccagtttttacacacttgattagagaggaaatctgttgtccaatataactagtttatctcacaggtcattttcaggacttcatgtttcctggcatttcatctaaaaacaggatcatcatagtcaagatttcttctggagtatttcctttaggatcttgacagaaagcccttttcatagctttgaggaaacaggttgctaggaaaacaaaaggaatcacgattgaccaaacttacatgtttgggagaagtagtcaggaatgctatatgattatggcatttacatttgaataatgcttcgtaccagaaaaataaattaggacaaaaaaaatgatgtgtacagtgactcaagtcagaaatagaattatgttcttggttaccttggatttaaggccaggatgttttcaagccacgctatgtccagtgacttacatgtgtggttcacgtttgaagcattatcttaaggttgttcttgttgttgttgtttttttctccatgtcttttgtaaattaatggagcagtttcaaacccctaaaatgtgtatttagcagggaggtgaaaagaccttgggctaccagatgttcttttattttggagcagttaaatgaagtagggaagcatatatattatctgggatatgaagaacaagtgaaggcattgcagctgcttgttagctagctgtgtgaatgccagagaagagtatacctaaggccaaatggcctagtaagtgctgatccccactgttttgttagaacaaatttaatctgttatagagttagtataagtataatttaatccacttatcacatagcatctgatgcctctgtgcttgtggcttggcgctctacctgtataaatccaggcaggacacccacggtctcacctactggagtttacaatctaaaggacaacagattatacactaagatgaataaagagcagacaacacattggaaactataacaaacagataaacactgataaagagtagatttttatataagcacagaattaagaacttacttgctgttcttgtgcttggagtgactaagggccggattgtgatttactcttccctcacatggagggaaattacacagaagtgcttcctccgctcccactaataagtctccagatgcaagtatttctaatgagatttgttctgaggtagggtggataatattttggaaaaaaacagttttgttctagtacactcaacatttttaatgccaataatataaaacatgacatataaatagcagttttgatttcttttgactactttctaaaagaaagtctttctgtagatttttcttgcttgctgccttggatctattggcacactccttacatcatatctccttgtcctgaaagatactatgcactggttagtgattttttcagaggtgaagaagggaacccttcctttgaatgcagtgagttctattaagagcacttggaacacagattgaggaagccattgatttagccctgcctcatgtaccatgttgatgggagacccaacaagactccatttctctgatcctcagctttgtcatttgtaaagtgacagcatcagacctatgtaacaaagttgtggtaaggaagtaatgagcttgaaaatcttttgaaaagaataacatgcaatacaaactgattttaagtattactaagcatctttttttaggtcatggagttcagtattattcctgttgaggctttacgaaaatggaaccatttttcagaggctgttttctttctgtagatgagagttgagacagtgctgaattgaactgttttcacttgcatattagttttttaaccttgatgtagtcattcatgaaacagagaccttaagttttcagaggggtcttaaagatgttcagcggacactcactcaaacctggtagaggtgacggggtgtcagaaagattcttagaaatatggtgtgtttgttttttcaaagttatttgcaagtttttattattaagaataaaattgcatttagccaaaaaaggaaattggttaagcaaaatgatatagtcacacaatggatgacattctatagcatccaaatcataattttatacacagacacacaaaacaaaagaaaaatgttctcaatagaagaagtaaaagcaactctaatagcctgacttcaccactgtgcaatctatgcatgtaacaaaattacacttataccccataaatttatataaattttaaaaagtaaaagcaagttataaatttatgtgaaaaacatttaaaaataggagcgattatgcatgtgcagaataggccagcaacactctacaccaacatattataacagtggttgccaagaggtaggtgaaaattttattttaattttttgtgttttattcttgttggtatttttggattttgctctaatgaatttgtgttacttttgtgatttggattattttaaacctaaatattctagattatttaactattagattatttaactatttaagataacttaaatagcatttagcatattctacactgtgagggaatagagtaaggataatgtttatggagaaatctgatttgaataaatttcatagaatctttcttcttcatcaaaataactgttagctcctattattaaaagtaatatgtttgttatgaggtttaatgtatttaaaatctaaactcattataaacctcagaggctaagttaattggcagtgtcaataatgataggagatatgtatgtgcaaaatgtttactagtttgacagggtcgctacttcacctgagcttcagagcccagtgtagtcttcctgggggctcagagtacagttaggagctgcatgcagctcaagctttatttgaaatatgtttagaaaagactgacacagccctttggattttgagggaatgtggataagaggcctggattagatgttttaaaagctaaaacatgtagttataattttaagtcctgaaatttgaatttgttgtattatgcattattatttgatttagtaggtggtactaagagatggacggaggcatgtggtcttttaatgcatggagtatatagctccaaaaagagcattggtttttgttgttgctttaggttgtgtttctcgtggtttgcctgtaaggtcagcctaaggaagctactttgccgttgtgtttccttggaaaaggaagctgtaaaagattgtccttgccgtcatgaaatactttggctgccagcatgaactcctggtgtgtgaatctgatttgggaactggtaatgtgctttatttctccagccactgtttttcttggtgtgggtgaaaaggaacaaatgttttgtactgattgtacaagccccttgcttagtgtgaattgttaggcctggactatgagatcatatacttggctgtaaaagtaagtctttcctttggatgtaagagtgctgaaatatttggtgagttcctacttaccaagcattctttatctcagatttatgaaaaatgattattatgtaaaaaaaggaaaaacaggatggacttttccagctaactgggcatgtaacagtgatttccctcaaccccaccccatctgtaaatggaacatccatgactcactactcatggccacacagacacttttgtaaccagtgcttgaatgggagggtgggatggggatggaaggagatgggctggcaccccacttgtgttcagccagaatctgtccagctgcctttataatggacttctgaaaaggacaatgtgccttctcatgcatcatgctacatatttttttttccttattgcactttctgtttgtgccagaataatacaatatattaagtgcaataaaatgtagccattaatactataatgttgtggataaatgttgtatagcagagtactctttctgttatataagattttagtattagcatgagtttggatccccgattatcatatttctgtctcctgaactgtgtgccttcatttctaggaattatttttctagttatttgtccctgtaaacttgtttaatttgtagattatactttagaatttgtgtccatcatagtgctataagagatttatatattggtttatgaagatgattttattaccacacctaagactttttaatcataaataagagatttctgtatttgatatatatctttaaataaatgattggtgtttggttatgtgctgatgtctaattgaaaatgacaaccaattcatgcagggtgtctaagtgagaatgaacactgaggcagtaggaattcatcccaaaagctgaggggggctaattaagaacctacatatctggtggggacctcagcctgattcccagtaaggatagttgcatgttgtcatagcaactctttcttcacaagttgaagacaagttagacgttaacctgcacattcctcaagagatgaaacaggtgttgatttaggatgtgttaggaagcagcagcaaattcaccagttcaattgattctggctttaacaccttataaatacttcagactgccaactctctctctgatatgcctggaaaattggacattttttgtcttatagtcaaaacctttggggttatggggggaaaagtatgttatcattcatttcttcattagctatcctcatttactcaagttcttttataaaatatgatttaaagatagttacaaaaataccttttaaattcaatgccacaaagtcttttaaagcatacatttgaaataactgtaaatgaaacaagaaaacgtacatgtgatagttacagcatggctgtgagagttcgtctaaatcctagccttgccattgtgtctctgcttttaatgcagtgcttggcaggaagttggcgtttaataaatacctgttgaatgaatgaatgaattcaagagttttgaacactgatgatccttaaagagtctctagtattccagaatctgatctcttgaaatatttcttgatgtttctagcatgcgttgtgacattttagaaaatgaatcttgttacagacaactcaaagaaatttcctcctttttgtcaatattagtgaattattttcctggtatcaaaatgatagggtaaaagtgctctaacagttgattgacctgcacccccacctccctaaaaaaacctttaagaagacacttgcctaagtaatatatcagagatccagttatgaaatcccacagctgtcagaaatgacctactgaaaaatgatttaaatatttatgaagctatgaaattgttagctgtgggttgatgatgtagaactcttctctatatacttttcagattcatttgaattcttgtatggcttggtaaaactgaaatacattatggaatgaaatgagcaaattggttctctcaaatttaagataatagtacacttaattgtgaaaacaatattgatattctgaaccctgcgaagactatatttgcatgttaaatgaagtaagcactttagaaaaaagatggaatcatctctgctttccatgtatgatttttccatttgagaaactaatttagaaatggatttgcgaatctgacatgttctttaaaaagaatgtgccagactaacatatcattaatggtggcctaccctgtgtgaggaggtgagccatgagtaaacattttctccaagcatatcaggcaatgactgtttgctttagaatggtacattgagtaagttagttgctagggcagaagggggcggccggaactactggccctgccctacccagagggcagagatggacccctggtagccacttggtgctgagtgcacaggctccacggaagaccatgtggacgctggtaactggccctgcagtggggttgccatatattgcttagtgccatgtgtacctgagaaattgcttatacatgaaattatgattttattttaagattttttcaaacatatctggttaaaagttcatataaaatatgttgaaatgtaagccttttcacaccccaatcccccttcccaaaggctaccattgctgtaccagtttctttcgtatccttttggaaatactctatgcaaatacaggaaaaaaaattctttccctcagacagagtggtagttgctgcctacactgttcatcattttgctaaaagttgctttgtattcctttgaataaattcatgtataacacttaacccagtagttctcaagtctggtcagacactaaagtcacctagagagctttaaatgtccagactgcttctcagagatcttgatttaatagatctgggctggggctttatgtttgtcttcatgaaactctccttgggtaatttgcatatgcagccaagcacactacaatagtcttcccttatctgaggtttcactttctgctgtcaacctcagtctgacaatattaaatcaaaaattcaagaaatggagcaactctgggtgcactgcctgtgagttagctctgctctgcaaggagcagtaccatttaaaaaagaagaaagaagattccagaaataaacaattcctaagttttgaattgcacaccattctgagtagcacaatggaatctccactgtcacttcatcttatcatataggcatttgtcatctcacatcatctcaaggagaaggagggtgactatagtatgatgagatatttcctgagaaagagatcacgttcgcataactatgattatagtatattataattgttctatttttattattagttattgttgttaatctcttactgtgcctaatttataaattaaactttatcataggtatgtatgggaaaaaacatagtatatacagggtttggcattaagcactgtttcaggcatccactggaagtcttgaaaggtatcgcctgtggataagagggcactactgtaattttaccagtcctctactgatggagtatttactttcaggctttattgttagaaatggtgaacttcctggttgaaagattcttatgccataagctcaagtatatttccaggatgagaacccaggttggaatttctgccaaaccgcactccagagaggttgcacctgtttatacgcctactaacagcatatgatagcggctgtttagtggagatgatttaaagtaccctgaagaaatagcagtggtagggtggtggggaaacttggaccctagctcattcttagtagttgttgatcacttgtctagttcaacatgtgtgcagattgttaaactcttttacagctcaatttggctgtgctttccagacttaaaaatgctcatacttttttgactcagtaacttaagagaaaaaacttttgtgcatgaaaatgtttaaaaaaacaaatgtttgtgcacaaagatgttctttatatattatcattataatgttaaataaaaggatcttaacaattgtccagcagcagggaagtatctaaattgttatgtcagctttgtaggatagtaatataatagttaaatgattatgaagacagtgttaatataaaatgtttatgttaaatgaaaacaaccagcaacagttggtatctacaagatgaatatattagtaaaatatgcaaatgtatgaccaagaactagaaagaaaaacagaaaaataataaagaacagttgacattatggggtgatgagattgtgggtaaatatcctttgttggtcgtggtttttttttttttttttgagatagagtctcactctgtcacccaggctggaagcagtggtacaatcacagttcactgtagcctcaacctcccgggcttaagtgaccctcccacctcagcctcccaagtagctaggaccacagacaggcatgcaccaccatacccaccttttttttttttttttgtagagacgggagcgggggtggtctcactgtgttgcccagcgtagtcttgaactccagggctcaagtgattcccccaccctgagcctcccaaagtgctgggattacaagcataagccaccttgcctgaccataaatatcctataaaatgtgtgggcaaaaaataaaaattagaggccaggcacggtggctcatgtttgtaatcccagtactttgggagactgaggtggaaggatctcttgagtccaggagtttgagaccagcctgtcaacaaaaggagaccccatctctacaaaataaaaaataaaaaaaaaactagctaggcacatgcctgtggttatagctacttgtgggtctgaggtggtggaatcgcttgaacccaagaggttgaggctttagtgagccatgatcgcaccactgtactctagcctgggtgacagagggagaccctgtctcagaaaaaaaaaaaggaaaactataaaattctattataatacaaatagccacttatttatgattataaagatgttgtaaaccttgttaattagtgaagacataattgtagaatatgtacataaatgacttccctgaaatcttttagaaatcttttagaatgcttttagaatagctatttctcaagaattttaagggagcccattctaacatttaaaaaataatagtattctttaccatttgctagcccctataccaagagctttttacttaaatcatttcacgcatgtctcatagttatcctttgatgatagatatttttattagccaatttatagattataaatttaccataatttatggatgaacacttgaggcttgcctgaaattgagtggtttactagtgaccctgggaattcaaactgaagtcagtcagctcttattaatatatgatctgtattctctctctgcagatgaatatttgaagtacttaagactgagattcagtggtagattttgtgaggtttataagaaagtatgaagtgtagctgagtgcggtggctcacgcctataatcccagcactctgggaggctgaggcaggcagatcatttgaggtcaggagttcaagaacagcctgaccaacatggtgaaaccctgtctctactaaaaacacaaaaaaattagccgggtgtggtggcgtgcacctgtagtcccagctactcaggaggctgaggcaggagaatcgctcgaaccccagaggcggaggttgcagtgagctgagatcgcgccaccgcactccagtctcagcaacagagggagagtccttctcaaaaaaaaaaaaaaaagaaaaaagaaagtatgaagtctaagtactatttctagggagcttactgttaattgtgcaattatatatgatgtgtgaaaaactaattaataatacaaaacagtagttcaggaccaagtctctaaagtcctattaagatgaaaggaaggagtgagggagggctctttaatctgggctagttagggaggctttatggaggagataagagctaataggtagaattcatagaggtgaaaaactttttaccttagaggtgttcctgagttaaaaatgggtggaccggtctctgtgaaatcagagtgttcttgtgaggcaagatacatttggaccgaattgtgcaagttgttgcaagcattattaattttaaattttaaatttaggtaaccccaaagtgtagatggggagggaccccagtctatactttgagtcttattagagtagggcctttgttacagatttacattttttgtttgtttttgttttgagacagagtctcactctgtcgcccaggctggagtgcagtggcgcgatcttggctcacagcaacccccgcctcccaggttcaggtgattctcctgcttcagcctcctgagtagctgggactacaggcgcatgccaccatgcttggctaatttttgtatttttttggtagagacggggtttcagcatgttggccaggctggtctcgaactcctggcttcaagtgatccgcctgtcttggcctccgcaaggtgctgggattacaggcgggagccactgggcccagcctggatttacatttttgaattcaaacctgactctcccacttacaatgtggggcacattattctctctaaatgagtttttttttcttttttttaatctgtaaaacaggtgtaaagttgcctttcttgcaagtttgtctgaagactagagataatacctatcaatcctactacacagtgtttgacaactattagacattcaatatgtagtgactcttataactctcagagacttaaatattatgtctttccctccagctctttccctgtattaaatgcatctctactgatctcaaggttgtagggaaatggcaagtagcttgtctttaccaaaaggtggagttcctgctctgaaggcaatgtggagccactgaggttttaagtagtggattggtggagcagcttgctaaacacagggaccctaacttaaattttggtgctgggatgcaagttagtgcagttttagtgtatatgatatatgatatcagcaagtaaaacatacgtgtattccccagtcttccctttctttcccctatcccagacctctcttatcttcaaagggaaaaaacaaaactcttacaagctgacagcttcatgctcccagcctttaagctttccctccagcctatggcaaaatctgtacttggtaaacctaccagatacataactatctctttttgtatcttttaatatcaggagcttcctttttgttttttttttttcctcaaattagtttcttgacagttctcttgcctcttttgattcatttcacaaacatttatgaggagtcagttatggcagctaatcctaaaattccagacttattgcgaggaaaggagtttgtgtttgaaggctcttactaattcagttctcacgattgttgtatttttacaaacagaaaagggagagggttggaaaaagggagggagagggagagacatttgtatcagaaactgggggtggggaagctcccaattgtccagtaatcttatctacagagtgctaaatactgcctgtaattgtatgtagggggtgggtgctagtttagataatgtgccaagggaagcgcacaacctctgcttgctccaactaaagctgttaaaaagcagtctagttccagtaggtgcaaatccacactttaatttgttcatcattttgtcttcattcttcaaatccagtttgtattggactttgatcttatagctgattactgtgccatgctgctctttagtttactccagcagagtattgagttttacagcttggactgttaaagtcaatattgtgtttaacacagcagtagcagagtgagttgtcttgagcttgccgtgacctgctagcatgctaagctagcatgcttaatgctatttaagaggagagttcctttcagaattatgtcaagattagcaattgatggtgagaattgttgtggtccaatcaccagaccacagtaggtaacttccctggggtgaaagcattgccatagtgttttagacctgtgctctgctctccatttattttagaaaccattctgtacaaggcacagggcctccaactcatcattttccctgcagaggtttacctcagagatgtttttagttggagaggggcaagttaccttcaaggagaaaataattgggtctctcttctttaattcaaattccaaagtattgtaaatctcatttattacctgtctgttctgaagactccacttttcttttcatcttagaaatatttggcatgtggatctagaccaactctgcctgaagcactgaggcaagcaggcttgatctttttttcttttttgcttggccttctcaggagtccgttcaccatcagattagtgaaatttcacacaaattagtgaattagtgtggccttgtcagggcaggggacgaggacatttgaactgcattgctctaggctctaggtggcctaaagtcctcacagctggaattctccatctggttccatccagttccagagcctggaccagttcagcttcctagactgaggtttgcatcaaaacttacaagtaatgaagggtttattatgtctaccattgctttctctttcttggggacctaaccggtatggatggaggaatgtacatgagtcacatttcagaggaaagctggacaggatgtggaagtgatggggagatacttgtaaacaaaaagaatagacaaaatcatgatatataaagtaacttccaagttttgagcccgaataatgtgggtagcataattagtggaaatagggaagttacaaggagaagttggttttgtacatgttgaatttaaggtgtagttgaacactctaagttgtgatattcatgaagctgtagttgtcagaagatattaagccaatatttgccaaagagcccagaaaattcatctcttgctctttaagacttttctttttctattccgtcctccaaaattacttctgtagaaattctgttccttcttccaaactcggtttagatgccacctctgattatctttgctgattgccccaaatgggcatgctgctccctttaaaccagtggtccccaacctttttggcatgaggcaacagtttcatggcagacaatttttccacagacagtggagtgggggatggttttgggatgattcaagcacattacatttattgtgtactttatttctattattataacattgtaataaataatgaaataactatacaactcaccaaatgcataatcagtgggagccctgagcctgtttttctgcaactggaaggtcccatctggggttgatgggagatagtgacagatcatcagacattagattctcataaggagtgtgcagcctagctccctcgcgtgcgcagttcataatagggttcgcactactatgagaatccaatgccaccactgatctgacaaggtggagctcaggcagtaatgctcactcgcccaccactcatctcctgctttgtggcccggttcctaacaggccatggtctggtaccagtccgtgacccaggggttggggatccctgctctaattcttcttatatggcagttaccacattctactagctgttttttatttatccaaatactttaccagattataccttgacagcaacattgtatgtatgtccctgtagtgtatagcataatactaagtacagtacgttagtaggagcttgtttaaatacgtttatttgaacctgcattgttttcagcaactaccagtacttaaaaatatgtgaatttattagccagtatataaagttcctctttttttttttttttttgagccagagtctcactctgttgccaggctggagtgcagtggcacgatctcagttcattgcaacctcacctcctgggttcaagagattctcctgcctcagcctcccgagtagatgggactacaagcacgtgccaccatgcccagctaatttttgtattttttagtagagacggggtttcatcttgttggccaggatggtcgcgatctcttgaccttgagttccgcccaccttagcctcccaaggtgctgggattacaggcatgagccaccgcgcctggcccctctcttttttaaaacataaatttgtctccaaatttgaagttttaagaacatctccattatttcagaatttaataaatgtgtttatcctacccatgattcgttctttctttaattttaaatttaataagagatgaggtcttgctatattgaccaggctggtcttgaactcctgtgctcaagcagtcctcccatcttggcctctcaaagtggtagaattacaggcgtgaggtcccgcgcccagccctacccatgcttcttaactgtatttactccatttttttctttccagttacagggttctttcttttttctttttctttctttcttttttttttttaacttcagagattctcctctatagattgtttaattttctataccagttccagtttagagttttgaaattcactgccaagaaatgtatggggtattttattaaaaatacactgttttacatatgaaggcaaagtaattttcattttgtttctgaggtcatatctgatttactcagcattttgttggctcctcccagctgacgtctctctttagtaaattatttctgtggaacaaaacttagagtttagggtctgtcataagaatagtttgaagatcttttttgcctaaaccaatctgacctttgcctggactgaaactcatttgccatctgtctcttcctagaaccttgaaagatcttactgtttattctctttacttgggacttacctggtgaaaaactattagtgccatcatctacagggatggccctatctatgaccagtctcgtccggattaattatgaaaatgttaagttcagtcttcacactcattgctgaaaagaccactctgtttatatttctccttccagagaaatgcttatctgtccttttgttttctggacctgatccagttctgtgtccaagataaatattctactggcttcatgctgttttatcttcataaaaacaagtcaccaaatacctgtgtactaatgcagttcatatagtaaaaacgttaattgcacaggagattcagatgaataaaagaacacttattttggtgtctcatggccagagttaaaaaaagaaaactagatttactagtgcacaggtcatatgctattacagcttcaaggagctgccagaagctcattccttccgtttgcatttttgtgaatgtcagttctgaaataaatgaacaaacccaggacttgaaaataattatttcaactataaattgtgcctgtcctcatatggtaatgagagttcacagtggtttttatttttaaaaaaaacagctcggtttgggaaaaggtgcctgcagtcagcctttgcaaacttctttattctgtgagatttttgttccctgttttctaaagacaatagtgacaaattaaccagagtcaaaggcattgcaatttttatgtagggtttctttgtccttatgaattttttgtgattctctcttcatgatgctatatttttaacttgccactttaactgactaggatgaagtaatttcttagcaggggtggggataggaaacagtagtgggagagattatcttcagagtctgtattgcttttgggggtctcagctttttttttttaatctctaagtctgtgactttttgaattttacagttgggacagaaggatccatgacttcaggtagctgatccatctcccaaagtctaggaggggaggaacttggatttagctgttgttgagaaagttcagagtattttcagcccccatgagtgcagttaaccagagatctttttaatggaatcatttcttttccttggcaaatacaaagatttgtttagccaatgaaatgtagtggggatttcaaagcagaaatgagctatgcattttggaggcttaggatactgaagttgggaattacatgttgtacaaaccagtttttcccatagttttcttttctaaaaattgtggtgggagagaggtgcatactggttaaacgtgctgctctgcgccaacgactggtatttcaaagtataaatgataaaaggaacttaactgtaaacttgatatttacatgagttttatttcccaaagcagttatatttattttatagaataggaaaaggctcactcaccagggctacagagctagttacccatatggataggccaagatgggggacgcagaccttttgattcctgcatcacacctcagccaatttttagtcctatgagtatggcaagttcccttgttgtgtagttaaaaaactgttatgaatttatagctaaaatacatttttatgattcttaattatctcacaactatattctcttgcatgttgttggacttttttgttattttcattagacttttgcttctttctggcattgagggactgagacgtaaattatgtaactctgaaaatcaagtccagcctctttcgtgtggcggccctgcctcatttctctttgctcttcccctcatactcttaagtccagtcaaagcgaatttgtctcagttcctcaaagaatcttgagttttttctttatgaagatttctttgtttggaacttggctcctcctttcctcctttaacctgactcacactcctaactagtgtggtgattaagagcgggagtgggcttggaattggacttcaggtttcgaaccctgacactatcacttaatagctgtatggtctcgaacaagttgcttaaccatgccgtgctatgctgcctttttctctttggtatgttgggaataatagtaaccacctcatggtggtggtatgagatttaagtgggtggttcttgcagttacgaccgtgctgggcgcgtagtaagtactctgattcctggaagcctttgccgataatctgctctttcacagactcattgcactgagcactctgtccccctggagtataattgcctgtgcatgacttactactcccctctgaggacagggatgaccatgccgaatctgtattcactttgcaatataagcacttggcatgtataggcacaagacaaatgtctgaataaatcaataagcaaaggcccgcttagctcatgctataatcttatgtgtttaacctccacttttctttctttttgtgatgatctttttgccttttatttggggtttttgatgggtgattttaggagaagggagctaatagggaagtttaacctaggttgctttatggcagcttctggagttgtaacacatgattgcttcatgttgtttatcccctttgggagaagaagccgtacatatggacaggcctcttgaaaagttgctgtattctttaagaaaaagtaggttccacatagaaaaggctagactcacaaggaacttgcaggttaacattgaccacaagtctggatttaatctaataactgctgtagcctcctgctccccagctctctaaaggcacactcacaggatttcctggcactttgttttgttggtcatcagttgtgctgtggccataatgtagcagtggaagccacttgactccttaccttccatgcttcatctttaggcaagagtaaaaactaaaagcaatgtaaaaggaaaagcttatgcgagagcaggatagtttctgactaaaagtaatgagagtccattttttccaactccaggggctgtgacctggttaggtcctggcagtggtggatgtgttctaggtgaaataatgccttacctaaaggaaaaggggagaaggagtttgctgtgctgctgtgattattttgtttaaagtcattaaaggtttggagggtagtacaagagtgatactagcgaataagtgctgtagaatccatcagattttcaaggggcagtagtgaaacacaaagatcacctgatcccaagctactttcacagctgagctcttctatccttcaccctccaacctcagagcctctaaaagcagtgtgtgtgtgtgtgtatgtgtgtgtgtgtgtgagaaatcacaggcttttaccattcagaacgcattttttcatacctaagatactatgttatgaaggacagttcatttatttattagaataatggctgtaagttaacctggtttttataggatggccaggtactctgactgccctttataatgatgtttctgatgtgtgctctgagctctaaaagtaaacttacaaatgaatttataggatcctcaatagtaaatgttcattcaaaagcatctgttgacattttccatattctaggtacaaagcattgttagagtacaagaatgaataagataacaccctgcccttgaggagttcggttcatggaggtttgctccctattcttctgttataacgtgcaacaggagctaacagtacagatgaagtattcctaatccaaaaatctgaaatgcttcaaaatcggagtagtttctgagtaaacgcaatgagagtccattttttccaactccaagggttgtggtagcctggcagtggtggatgtgttctaggcgaaataatgccttacccaagggaaaaggggaggaggggtttgctgtactgctgtgattctcttgtttaaagccattaaaggtttggagtagtacaagagtgatactagggaataacttttgagcattgacatgacacgtcaagcgggaaattccacacctgaccttatgggtcacggtcccaacacaatcaaaactgctacatatgcaaaattattaaaaatattatatacaattactttccggctatgtatatataaagtgtatatgaaagaaacataagtgaattttatgttgagacctgggtcctatccccaagatatctcataatgtgtatacaaatattccaaaatctgaaaaaacgccaaatccgaaacacttctgatccctcgagggatttggagttttttcagattttggaatatttgtaaatacattaatggatcctatactaaactataggatcctgttaatatcctattaataaatcctggccattctataaaaaccaggttaacttatagccattattcttaataaatattttggttcagataagggatactcaacctgtataccaaaaaataggcacaaggagaccttacagaagtgctcagtaggctgggcatggtggctcacgtctgtaatcccagcattttgggaggtgaggcaggaggatcacttgaggccaggagtttgggaccagccacgtaatgagattccatcgctccaaaaaattttgaaaatcagttgggcatggtgatgcatgcctgtaattctagctactaaggaggctgaggtgggaggaccacttgatcccaggagttccaagctgcagtgatctgtgattgcaccactgcactccagcctgggtgacatagtgagaccttgtctctaaaataaaatgtaaaataaaataaaataataaaagtgatcagtaaaggttagatgacttaagtgtctaagcttagtagtatatacctttaattttcacttttttttttcacttagcactttcttggatttgtatcttcttatttggagagttagatgctaaatacacattttaaagttgtttttatatttgtgctcataatttttaaattcttgtctttccattttgtttgcaggtgattttcccaaaataaataccaggctatcatgattagaattaaacagttttctgaaaacctaacctaatttaatggaatggagagagaggggtgagggtaacaagggaggtggaggaggggcgtagcaataaacgagaaggtggaattttctgataggaatttgtgatttctcccttaacattttcaggcagttttgcttccaatcccctctataacttcatttttatttttagtgcctacagacactctagtctttagatgttccttctgcactgaggatcctttttttttttttttttttttttttttttctttttgagacagagtcttgctctgtcacccaggctggagtgcaatggtgcgatctcagctcactgcaacctccacctcccaggttcaagtgattctcctgcctcagcctcctgagtagctgggattacaggcacctgccaccatgcccggggctaagttttgtatttttagtagggggtttctccatgttggccaggctggtctcaaactcctgacctcaagtgatccacttgcctcagcctcccaaagtgctgggattacaggcatgagccactgcacccagcctgcactgagaatcctaagagaattttcatgttggtatgtttgtaataccagaaatgttaccagttataaccagctactgttgatgtgcaagaaattctattttggaaggccaaaacagaggataatgcctccctgcccagacggtctgataagaatgtcagtaatgccctctgtgtttcatttcctgtgtgttctctacattcggcattctgcagtctgagggttatatacatcagtaatctcgagtgcaagcatgacacatatagaaggcttgaaaataggtaaaacatggtggtaggggcagctgatagcaggaaaactgtccttaggggataacagacaatgagatccggagagtggtgatctggagaaattagccgggcatagtggtgcacacctgtggtcccagctacttgggaagctgaggcaggaggattgcttgagcctaggaggttgaagctacagtgagccgtgattgcaccactgcactccagcctgggagacagagcaagacgctgtctcaatacacacacacacacacatcaggtgctaagtacagtcctcattatttgcagattccttattagtaaattcacctacttaccaaaatttgtaaccccaaaatcaatactctcggcactttcatggtcactcatggacatatgcagagtggcaaaatatttgagtcactttacacgcatgttcccagctgaagtcaaacagggtaaccctctgctgtcctgtgtcagctcttctataaacaagtgtccttttcacagtgaatttagtgcttttttttttttttttgctgcttcttggtaatgtcactctttagcccccacgtatagtgctggagtgctgtctagtggtcctactgtaagaagctgtgatgtgcgttacaaagacagtgtctttaggtaagctttgttcaggcatgagttaatagtgctgttggctatgagttcagcgttaatgaagcaacaatatgcatgaaatagggtatcttccaacagaaacacatatacactataaaccaaggtatgtattaatctgttgatgaaaatgttgtaatcagcggctttcaggaacctaaccctttatttccccctagaagcagtggttcggtattcactaattcagtgttcatggtgactttatagaacataactgcttcacagaatgagaatgggctgcacagtagaagccctctgcagcactctgcagccttagaatggagaaggtaaatgggtggcttcatcctagaatgagttttggaggccagtctgattgaaggatagaatgaggtagggaattaaagtgatgacttgttggctttgaaagataaagaggtgaagtcaggatgggtttgataaaggaagttatcaagggactggaagattgtatgaagtcagagggcaggcctgcagggaataattacagctgcaaggatcagagggtatagtcaaagtcttgctggaaaatgggggaaggtagaaatgagggcaattaaagaaggcagagaacaacacatttgtttttggatagaccattcatgggaactttgagctctagggagtgatatagggatacttaggtcagaggacccagagtgctgataaagacaattggaatgtgcctacaaggtgcagctgtctgtgcaaatttccagaaattccaagaaccctgagacgtgatctaggaatcctaaatgtccagatgtgaaagcaggtataaacaggcctatgcaaagtatcacatgagtggcaggttcttgactacacagaatacagtgtactttttcagttacaggacccacagcattttaccatggaaagatgtagagaaagaatcaagatttgtttactgattaggtttagggagaggaggggaggacaggagtgaatagtcaagagttgttccagtttgactaattgctataagatgctttttgttctacagagtttaatggatgttttacttccagagttgtctttgttatatcataattcttcagttttcagttcccttatcatgtgatttttgttattatgacatttaagattggcgaatgagcatacttatggtttggtaaatagaggtaatgattcctctcagttctgtttgcatgggggttgtggagctaggtcagcttcctcctgactgtctttgaagtttcactgacaattctggacactcagattccagctttccaagctttcctattggccactgggttaggtttcatactccttctattggttgctgtgatggggtttgtaaatggaacggaggcaaatcatacttgtaccctactattgtcatttatgtgaagagttgtctagaactacgctgcccagttcagtaaacaccagccacatgtctagtcggcccttgaaatgtggctagcctgaattgagacattctctaagtataaaattcacattggattttgaagacctagaatgaaataaagaatgtgaaatattctgtgagaaagttaataattttaatattgataacatgttgaattaagattttgtatatgttggattaaacaaaatactaaaattcatttcacttgttttttgtttgtttgtgggtcctgctctgtggcccgctggagtgcagtggtgtgatcatggctcactgcagccttgacctcctaggctcaagcaatcctccggcctcagcctcccaagcagctgggactacaagtgtgccaccatgccaggctaattaaaaaaaaattttttttgtagacacagggtctccctatgttgcccaggctggtcttgaactcctgaactcaagtgatcctcccaagtgagcctcggcctcccaaagtactgggatcacaggtgtgagccactgcatccagccctcacatgtatttttcttgtatgttttttaagttctagggtacatatgcaggatgtgcaggtttgttcataggtgaacgtgtgccatggtggtttgctgcacctatcaacccgtcacctagctattaaaaaaatatggaacacttcatgaatttgcgtgtcatccttgtgcagaggccctgctaatcttctctgtttcgttccaattttagtacatgtgctgccaaagtgagcacctcacatgtttcttattgcagttttaaatatgggtactagaacatttaaaattatatttgtggcttatattatctttctgttgaacagcactgtctctttgagttattttttggatttccatggaataatttgaaaatgattgtattaaatgatatacttctaaagaaaattcttgggtccagttacattaatcctctcgaagttgttagtatacctgaatgtatcccttataaataaaacgattactgtcataagtactaaacacccctctgctaagagaagtttattcattttccttggaaattcctctatcataaataaaatgaagtcaacatttatgacagttctactggatggaatataactgaatccgtttaagaactggtatcagggttagcattagcttggattttggactaatcaaatgcagtcatatttttaaatgtgcagttctttctcaaaggagcatttgaatctatgtcacattgagccgtggtataatgaggttttgttgtccctgagagagtgactattttcagaacttagatgaacagctatttgcaaggcagccttagtaaatatgacagaaaagaggttcatttaaaagcagctagtttaggaaccacttactaactgcctgctctctgctcagtgttagtattaactgcacaagcaaaacacaaaagaaattaaaggtgtggtccatgtcctcgaagttcatcctctggctcagggattcctaactgacatctacattctgaggtatctgatgagatgtaaagagagattaatacctttataatagcagctaaagcactaaactttgaaaattatttcttaaaagtcgcagatccaaagttacttgaggaaacaccacttccacacatgttctgttacgggaattgtgcatggcttgcaggtattcttccctaaaccaggggtccccaactcctaagccacagaccagccacacagagcagcgggcaagggagcgaagcttcatctgtatttacagctgatccccatcgccgatgttaccgcctgaactccgcctcctgtcagatcagcagcggcattagattctcacaggagcacgaaccctatcgtgaactgcgcatgcgagtgatctaggttgcgcgctccttatgagaatctaacgcctgatgacctgaggtgcaacagtttcatcccgaaaccatcccccacccccagtccatggaaaaattgtcttccacgaagccagtccctggtcctggaaaaggttggggaccgctgccctaaaccgtggttggtggcagtgtgtagactcggtgactgttgttccaaggtatagccaaggggaaagttgaaccatagttgtagttggggaggttctgagctacaagaaaggtagagaatccttcagaggcattgtttatagagtccgttctatcttcctattacaaatattgaaacgttttcggaaagggaccatttgggaagtttttatagagcaaatggcccttggtttgggtcctaaaagaacttagaggattcagcttgtaaagttaaatgagcggtactttagaaggggaaattgatgtgactgaggatatatggggtgttgaaaggggatttatgagtggaagagagaataccttatgttaatttgaaagataattgttccacagatataattttctaactgttgtgctaatttgttctagagcttattgttcccaaggaactttgtgatgagtctatctcagagtgtttaattgcctggagcttccagagaattggctatgtttttgggggagggaagatggggtgggaaggtgattgaccttcttgggcaaaatcattatttgccaggtatcattgtggccaaagttatttatcttggcttcatgttgtataaatacagtgcaatcatctatgagtttagcaactcaaataggacagtgagtacttttgggcttgtgtatataaaaattaacacgtcgcatttgtctagaattttatagtttttcaaagggattttcaaatgctcacatttaacatctccaacaattcttgtctatttatggttaaggaaactgaggcccagagagtctagtgtctttccccaaagtcacataggtagtggatgactaggccagaactagacttaactcttgccttgtcgtccaaggttctgttccctggtatgacaccctctctcagcagggaccctgctgacagtgactacgcgctggtggctggcgtctcctgagttccttgtactcagcctgatcatgaggaactgactcagagaaatgagagtctgctgattcagagctgaatatcctttcccagtctttcatttcccagctttctcttctcctaaattgatttctgtcagctcccaagcagctttcttagttgtcgtagctattagaactcttagagcactttaagagtctttctgacttaatttactagcaatgaatgtattgcatgagaaacctttaattatagctatattttgggtaggtatcactatttttgcctgtcaaaccaaaactgaaggagaactgtcactaacttaacctctacatagatttcctttaataattctcattgactttgttattctgttatacacattgacttccattgaatggatttgtagcaggccaagaatgagtgagataccagtacgaaggctattacggtagtcctggcaaaacactgggctttgctgggcatggtggctcacacctataatcttagcgccttgggaggctgagacgggcagattgcttgagcccaggagtttgagactagcctgggcaacatggtgagaccccatgtctacaaaaaacacaaacattagccaggtatggtggcgcatgcctgtagtcccagctactcaggaggctgaggtgggaggattgttcgagcctagaggtcgaggctgcagtgaggtgtgatcttgccactgcactctagcctgggtgtcagagcaagaccctgtctcaaaacaaaacaaaacaaaacaaaaaaccccaaatccaccaggcttcgattagggtggtagcagtggaatttgggatggaagctgccatctctccactggcatgagtcaagagggagccaggagtgccacaggctccagagaaaacttcttgcccagccttcctatcactagtgttgagagaagagaggggcttctggcaagaccttctcccacaccactgggagacctgttactccatcaccacatctgctttgagactgttggcacactaatttcattttcctctttatcctgtttacaactatttacactgacagcctttaaaacaccaaggcttctaggtttttttgtttttgtttaaatttttgttgttgttgttttttagagacagggtcttgccctgtcactcaagccaaagcgcagtggtgtgattatagctcaccgcagcctcaaactcctgggctcaaatgatcctcccaccgcagcctcttgagtagttagcattacacgcacgcaccaccatgcctgattacttttaaatttcttacagagacagggtcttgctgtgttgcctagggagctctcaaactcttaaactgaagtgatcctcccacctcggcctcccaaagtgctgggatcacagacgtgagctaccacacctggcccttctagattttttcttaatccaagtctttactctccatatataagagatggataattagataagtttccctcccactgaatattccctattgcttacccttcccctgcttcatcttctgctatagcactcaccatttgttttggcacactgaatatttttctgaattattgattttcttctgccactatcatgtaaacttcataaaggtggcaggggtttggttcatgtatcatcagcatcctaacagggtctggcacatgaaatatttgaaaagatgaagtgagtggagttttaagtctttagatagcacattttaaaagtgagttcataaattattctacaaaagcaatgaaatgcctttataaactggaagaatgtcagatgttctttgttttgtttaatcccatttggtggcttgtgtaattataacacagattaatgaataactcttagtaattccaaaattaccctaatggcaataatatgtatttgtatgatgccatttacagtagcctgaatgaattttttattcctctgtcagataaatagttgtatctcaatgttataaatgttaaaaattataaatgcttaaaaatgttgtaaatgtaagagagaaggctattcacaaaaacattcctttccaggaaaacagagaccagtctagtgtgagacataggtgtgtagttggttagagcaaggcatatgagaaggtacagaatgatgagaaggttttaccttcatgcccatgaggtggctaaattgtcagtagtagttttgggcatgtgagctgctgcttctcaatactgacagcattttaggggactggactttgtacagctctgcattgcctgctgaggaatccaggcatcagcaacagaaagttccaaagcattaacagaagatttaattatgttatagctgtacatccaaatggaagggagctggagatagccaagagttctctgctaggtgtttttcagacatgcttctcatgaattaaataattttagtcctgatgtggagattgggagcactgaaaagtggtactaccatagagcagttttctgtgatgaagtaggtagagtaagcaaatgtgttacataagaatttctgcagcaactcttccagacaccttctaccttacttgataacagagtgtcctgatcacatgatttgcagagaatgagagatctgtgaatgattgctgagatgatggccccaacccagtagctcagcttccaacttcttaagcagctctagactactgataccttcctttcctaggtccaaatgctagggacaacctggctcaaaatcaaagttaaactttaaaagttatgtaatattttgttgctgatgtgtttctaacttttggcagtcttcaaaaaataatcccatagctgctattaatttcaggggaattaatgattatatgattataatttaatcatggggatgggttgtaaaaatcattcataaggaaaataggttgtagattgagttctgatattggacctttaaacaaaaaagtcatgaaagtctttatccaaattgctggttatctccctgattctagaaaggttgaatcattttaccgagacaaatagatacgcagtgccttttcttgtgggtggagagttacactgccggcctgacctggccacctctttttggtgttaaagtttagatatgaagtagttacaaacacagctttattgtagctcttctgggccgctgtttcgtttatcaggttggggatttcctggagccttaactttcttttccttatctctgtgttgtctggatgctggtacctggtcagatagcctttcggtagcactttttcaaaaaaacgtataatatgtgtactttaaaaattcctctcattgttatgtatattgcattgctgcttgatactacacaaagtttccaaataaagggaaattgtggagctttgtttagatactttaagagggtaatggctacggctatatacttttgctggtttttataaatattaatgatagcaattatgttgaaggaaaaattgtgtgagtcaaattgcacccttccagggtgagtgctttgcttttcctttcagctgtcagaaattgttttgcctctgatgattctcttaaaataaagcttgcagaattattacagattaaggaaatcaagtgatcattaatggcaagaattttttttaaaaatagtttttcccattgtttgtaaataatacatgcctattattagaaaattcgaaaatataaaagaatttttaaaaagtatcctgatcatggctgctcaaaagcgttctgatattgtttttctatgctttcttttttctgttttagttttataaaactttttctacatttagttttataaaagcatacttgttatcaaactgcatatacaatttttatcccattctttttatttaacataagaattttctatgtttcacagattttatgaagatgtgccactcattcattgattctttcagttactgggtgccttctctctgtgctctgggtgccaaatgctttgctttttaaagtatggagacatgggagtagaaaataatctagattataattaggaactgcacatcttcctgaatttccatgtaactttgatctggatctgaaagttaaattatttcccaggtagttccacattttaagtcaaaacaataatactcattggtttgtattatatatttaagctaactttgtgtggattaaaaaaaaaatcactctgcctaggagtctttccctagctgaagtgctggactgggagtggagggcagagcagaatcctggggaggcggtaggggccggtgtgcttggcttctgcacaggaattgtttataggggtgagtgagtagggcagggttcatggcaaggtgtccgacaagatacttagtcactcacaaagcacatgacttgggccttgtcctcagaggactgaattagtgagaatctaaacattctaggtggcacggaatttgagatgtagaagaaagaatttgacttatcagtcagtgatatccaattgcctcctccttagccccttcccagatctgtcccagtggtcaggcgcagacgtggtatgagaatgagcagggtgggcctgctcctgagcaaggatgcctggatttaaggcctggctctgccactgacaaactgtataccttgggccagttccttaaccttcctgtgcttcattctcctcatctgttaagagaagatattactactgcctacttcctatggttaaatgaaacacatagaacgatgcttggcacataaaagagcactcagtggatctaactacctaccagtattttctaccctatatgactgaatttgacatattgacacatttccttagcgctgagctcgtcagatgagtttagatggcattaaggtaggtatgttattgtttgattgcacactgaactggtatcgtgaggatggcctgctgcttagctagctgttaggaactatccatggtcatgtttctgaaaacagccaagtattgacagacttggttctgatcctggatctgtctccaaagcccattcccctaaagtagactgcttcaaaaaagcttgcacacccccttaccttaatctactggctgtgggctaagaggaggacctattttgtttttaataaactttgattgaattataatatacaaaacactgtacatattcgggttgctgtgtgttcacagtaccagcactgggatcaagaaacagcatcccataacctttttgtgtctttctggggaccgtgcttcgaagtctctggtagaaagatttgtgatcatttgttcttgtgcaaggagaaggcattatggaagatagggaattacccggataaagaggaggatcatttgtgatgctgtggatcttaaacctcccccactccctcctgtcctgtatttatttctcctttttttctcattaatgtaatgtgaatatcagagaaagagggattctttttttttttcctttcaagattggacatactgagaggagaaagattcattattgcaagattcattaaatgagaataatcagaatggactttttagggagctgtattaagtcttagatttttctcctccaagctacgtttctcaattgttgcttctgagttaatttttcattacatatcatgatcattgcttttcatcatttgaagaatgtgaagtcaaggaattacagaaatgcatgaatacttacctagaaactttcatgactttaattctcccaactctaaattaggcatgggaatgggctttttctcaggtgtcaaatcttggattggaggtgggtcctggcagcactgcatccgaaggttttggagaggagtctgggcatcacaggagacaatgtgattgtttagagattttggccacggggaaaagaggttggacttgtgtcttgagtaccagatatttgtctttggtgatctaaatgatactgtgctatttattgattcttaaacttggcactcttctgtaggaccacttaatacctggtacatgagattggaaacagtacaaatagcagctttaaaaaattgaagtagtagtctgccttccttacatataccacatggattcatcatgctttcatacttctgtggtcctcccttccagtgtcttagaaagttcatcagttttgtgaaagtagcagtggtggcaacagcagttccagtcaacaacctattgaaccgcatgtggaatgtgggagtctagtcagtgattgcagacacttttgtaaatgtgtaaactttggataacccaaattatcttctatgatacatggatgaactgtagaaaggaaatagataacttggccatgtgtagggttacaaatagggtggatgataaattgtaatatgcatagtatttaatatttaagagcaggcacccagcatgataatgaataacaatgtgaatacctctctaagtgtgtaattacattttaggaaagtgaagatcgagaaaaaagggagattggattgagggagagaacagactcttaagcataaaagatctacacatacctcctcttagttactctctgagttgctctaatgtctcagaagagtggttgtgatgatacaattatgctttttccacttactgaagaaattttagagctcctatttaaacataaggaaatttgaagtcatgtagagacatcccctttaacatataatagttgtggttttttcatatctaccctattacattttatcagattttgaactgtggaattaaggcttattagttgggtaacagaggaaatggcattttcacttttaaaaaaatctaaaaatcctttctgttaagatatcatgttggtctcactgattggagtgatcccaagatattaaaagcctctatgggagcttttgctatagtaaacgagggaaagggagaaatggagtgtgagtgtataagcaccctcctgatcagactgtatgcatctgactatcaaagaagcacactgcttgttacagttagattcatatcatagtttttgttttgttttgttttgtttttaggtggagtctcgctgtgttgctcaggctggagtgcagtggcacgatctcagctcactgcaacctctgcctcctgagttcaagagattctcctgcctcagcctccgagtagctgggactataggcatccaccaccacacctggctaatttttttgtatttttttagtagagacggggtttcaccatgttggtcaggctggtctcaaactcctgacctcaaatgatccgtccacctcagcctcccaaaatgctgggattataggtgggagccaccgcacctggcccatatcatagttttaatgcaaatatttagtgttattaaaccaatcagaaagtatctgatggacatctaccatggataaaacctgcatgaggtacaaaaatgaatgtcaagacccagactaatatgcaaataatttataatctagttaggatcgtaagagatgtattatacactttttttttttttttttggacacagggtctctctctgttgtccaggctggaatgcagtggtgcggtcatagctgactgcagtcctgaactactgagctaagtgatcctctcacctcagcttcctaagtagctgggactacaggcgcatgccactactcctggctcattttctaattttttgtagagatgaggtcttgctatgttgcccaggctggtctttaaatcctgcttcaagtagtcctctcgccttggcctctcaaagcactgcgattataggcttgatctacagtagttttcatagtgcttgtataagtaatcttttggttctctgttaaaaagagaaagtgactttaaaggcagtttatgggaagaaagaactcatgatcagtggccatgtcagttctaagctcaaaatgtgttcttcttggagaaaggaattcattttctcctaatctggttttatcttgatactatcaatttagcatgtgccacagagaattcaagttgtcatatgtgtgttgcaatttttatttctcaggagagggtgaatttcagctattttttgagtttattttgaaggaattttagggattatatatataagattgtcttaaggtaattgaaggccctgccatgacattagtttttctcacactcatggagtgaaatgtgtggataccgtacattaaaagtaatggcaaaaaccgcaattacttttgcaccaacctagtacaaaggtgcatttaaaaattgctgaagccaaaggaccagacaagagttcatcaggttttaggaatccattaatgttttcttcaccaaattccaggactaagaaaaggaaaagaattggggcaatcccttgtagttttgtatgtaaagatttgacctgtattccagggatcttgatttttatttctaataaaagaaaaatgttttcttcgtgaacccacagaatcatattgattctgtagcattgttctcctttttcagatgaagaatattagtgtcagaagtcaaaattgagctgcttttgtcctcaggttgggctttctcatttgaatatgcctaggaattcagtgcaagagttctgagggtttatggctgctcgttatcattttttttgcttgtattaaagcaaggatatatccctaatctgtgtcccacctccccttgtcatctatacattaagtcctacatttggctgttgtgggtaaccatccctcacttgctgtgggtagaattttgcaagattgcagagtaagacctgtcagctgacactggctcacatgagagccattaagagggtggtgtggccaatgtcagaacaaccttgcagctgaaggcaagtcactgcattgcccagagccatatgaacaggtcttgtgaccaattaattgactactacataatctccagctagggtgcacagatggagtgagtcagtccaagctgctcaacctgttaaatgtcttttctttgctaactggagtataagcttaagaacaaaagtaggacttgtctatgtttgtaatgggattgcagacagcgtgttttgtaatgtgatagatggatctgacttcctaaattattggcaggcttaatttacgtaacaaatgaatgttccacctttttttttttttaaacctttgaaaggggaaattagtacactgctgtcaagtagcttttctcacatactgtatagggagtgaaatgattgtttagaactgctggtcattacagaatgttcctcacataacaaaggaacttcaggatttgtctccaagtccatgtttatggtcaggataaaccagaagaacattaaaccgttcaggagatgtgcggcggcacagcgaacaccacaaaccagccagagagctggcaagactctgccagatgtgtgagtgatgctgttcctggtgctgggaggatttacagggcgcttttatgcacaaagattaaaaaacacaccggagtagacaggagcactgaccacacggaactcgacaacaggtttgaaactttagttgtttcaaagtctcagataattttttatttaatttactgtgtagtaaggagatggaattgtattgatctgaaagttgttgtttctcataagtgcttctaagtaggagaaatggggttattggtggatgtgcagagtcaagtcccttctcttacagaagagatgtaagcatgggtattttttagtgactattgtgacttcactacccatctgttttcttcttttcattacctctactggagccaacttataagaagtgtgtacatctttgtcccatgaagcttggatgaaactgttcacagtaattatcaggaaaaaaaggtgccgtcctgaagtagcagcacagttagtagatggggctcaggcctgggcgttttcacttcatagtctgcgtggcagccaggtggttgtgcttttccagttggaagcagggtggtcggggtgacccagtcttcctctggaagaccctttccatgagaaggatgttatgaacagcaaattttaataatggagcttgtctaaaaagaatagcatacttataatattctttttggtttatttcatccacgttcttccgttaataaatttggaagaatttattaattttattattagtggtacttaattgaaatgctatttgtaaagaattttattgcatatcaataaaaacaaaaaactgttttgagaattacatttcattccagattcttccatagatagatagtaaggagagctaaaagttaatgattagtgtaaaagcaagtttataagtgcatttaacttgggcatggtggcttaaacctgtaatccaaacactttgggaagctgaggtgggaggatcacttgagcctaggagttcaagactagccagggcaatgtagcaagaccccatctctacaaaaaaattttaaaaataattagcagggcatgggggcatgcaactgtggtgccagttacttgggaggctgaggtgggaggatcgcttgagcccaggagttgtaggctgcaatgaattgtgatttcacctctgtactccagcctgggcaaccgagcaagactctgtcgctttaaaaataataataataaaataaattcacttaaaacatttttttcttacagaaattttctcaaaattaacatatctcatcaactttatcccataagtatgcttcttagtttggttaaaaataatcaggatatagtttttgtcacgtaaaaatctttgtcattttttaatagaaacaataaaacagggcaacagagtgacacttctatctctaaaaaagaaaaaagaaacttaataaaatgggatgtagtccattacagcgtaagagcacagtagaccggagagtgagagagaagtgaggaagttattttacaagtgttaggtcacatgcttttcattcagttaaagagatctgtttgtagaggaggaggtaatgatatggtacattagaaaaatacatttgagtgttcagataagaatttcacttttatactatctgtttttatctgtttcttatcaagaaagggcagctgagtgataggagagagtaacggagtgacactcaagtttatctgaatcttgatccctagctctgctgcccaggagcctctaaccctgggccagtctccaggcttttcttaatctcactctcaactgttaaactatgtaattggctcggattattttaaaaattctttcttcttctgagattcttagatgtagtagtagggccttctgtattccgtatttttgttattctatagaattctagatccccagatagttatttaggatgaaagatggggattgaatgtccatgtaaggacataatatgcagggccaattttttaaaaacctctaaaatttttgatatgagctgctgcttctcaccttcgaagtgatgctttaaattttaacattttcatacctgttatcctctttccttattttaacttcctttagatttacttctctagtgctgagaatttttttttttagaactttgtacaatgatgacatatttgtcaattaattggaattcatctctagtcagacaatgtgctgtagtagacctcatctgctttctcttctcctttctacgatcttggaaacattgcttacttgcagtattgtgcttggtttccagaacttctttaggacttgggccaacttgagggtagaagtgaattattgacaggcgcttgcactgaaggacctggctccagagtgctcacagttatctgtttgtccaagtcatatggcagtcaggtaggtaggacttccaatctctttttgctctttgatatcttaaatcagtcgttccaagtggtcttcttagttgagcacactgacaagcaggggttttgtttttttttcttctcatgattttccagtaactgaaaagatgaagagaaagattccacaattacagtagaatcacgttgtattatgtgatgatggccacagtgtaaaacagacggaaacagtgcagaaagaaacatgttggttgtctcattgcggttcatgtagcatgacacatttcaggataggagttgtcctctgcatctccatttccattccccctaacctctataaaggcagatgttggggttcaattcatttcacaaaattctagagtcaacaaaaaactaccaagtttgatgagaggcatcttaaatggcttgtcagtaaaaattccttgctaaaactcccttcaaatctagtgactctttgctgggcatggtggcgttcatgcctgtaatcccagcactttgggaggctgaggtgggcagatcacttgaggtcaggagttcgagatcagcctggccaacatggtgaaaccccatctttactaaaaatacaaaaattagctagatgtggtagcaggtacctgtaatcccagctacttgggatgctgaagcaggataatcacttgaacctgggatgcagaggttgcagtgagccgagatcgtgccactgcaccccagcctgggcaacacagcaagactccatctcaaaaaaataaaatctagtgactcttaaatatgatgccaggtatatggtatcatcctcaaataattgctttcaatcctctttcttaaaatattgactatagcaaagctgccaacaacttttgagtttttcaaactttcccggcaaattagcaaacaaaattcttacggctgtttatatgagaaatctgggacttgccacacatatttgtgaatcattgttgctctggtggcaagagaaaacttgccatgtctttaaagtataccccttacacactgaaaaggaactgaaacagagcacttcagagtcaattgtgctttacagtttcatatcttgaaatttgaattcagaagaaattctctgtactgctttagaatcaccaggatgattctaaatgagtatatccattttatgtacatttttagatgagataattctattaaaaaagggaagtccttagattgtctgtggtagttacttaacaagaaagtaagtacagaaacttgagtgcattgttccctggtgagctgcttcacatagataagctgaccatgattttatgaccagtctttatttatagcagttgggattactgactaggaaatataaaaatagtcacagatttagagagagatatgctaaggcaacagaccaaagaattctgaagagtataataaaaggtcattaaaagtaagcgtaatgcaggtttgtaggaatggaaagaatgtttctcactgctgctcctggaaacagtgtgaaaaccactctaccctgatgctacttaatagaaaatgtagcagttggacaggttgaatgaagtgggtagagagaaaaaacaaaccctagtcagctgatggtcttgtgctttgtgacaagcttcacagagaggtcgtaaatggttgggtgtgactctgatgggttgggtattgtggtcacacgttcttctgcgcttcctgcattccttccctttttactgatttttacgtaccatgagaatttttctttgactagttagaagagtttatttctgctggctgagggtagagattttgagatataattccagactgataagagtgaatgaatcaaggaatgcagtgttgtgtctgatttagggttcaagaacatttgtcttttccctctgaggatacatcacttactaggaataaatcagcaatcttaatataggagattttcatagacgctaacaactgacatcagcttttgtctcggtcatatttggataagcattgatgacataacagggtaaagcacttgttattaatcaccatagctaactgtgtccagaatgacagtgttccaggcagaagatgaggttaatccagctctggagtctgcaggccagtcactgactgggcagcttctgaagccttttttcctcaagttctgctcagctctgtgctgaagcggaatgctggctgaactggtccccacatccctggttctcctgttatgactcctgtggtgagtcaggctctggcttagccttatccttttattgttacagtaacaaaagccaaataattgctgaacagtgatgtagcaagccctggtgggaattggagagagcaataacttgtgacccatctaagattataactgtcaaaagtcaccaaagagaatccaccctgtgggttataaaaacacccaaggttcctgggaatattcttatcttttatgagttcccaaggggatatttaggtatcaggtgtacacccatccatcagccttatgtctttaagggtttaagaaaggttttttaaaaaaactactttaggtttttacagaacagatgtgaatgaaaatccttttttctcactatgccatatcctttcactttcatgcctcaccctgtccaaaggcagaaaaaggaacttagttaagctattttcccacttactgattttcagctctagcatatgagaacctagacttaataccagataaaatggaagggactttgacttggggatcttctctaccctgattttatgatctgagggtcttctctgccttaaaatcagtgtctttgggcacatcatttcatctctctgtttttgttttttaaataatattaattaataataataatgatggtagattggaatggtgtttcctgagcctcaacttcagatccactgaaccgaattcctagaggtagagcttgtgaagctttgttgattacacacacacacacaaacacacacaaaacttctggggtaattctaacaatgagccaaacaacttggaaccagtggacaggtagtgtctgaagtcccttccagctaacattctgataatctgtcagtgatccatgagtcccgaagttagagaaatataaaggctgggccttgggtaatcaggggagttaaaactagctcagtggtaatcttttcccatgtgagcgaacaagccacgcgggtgtttgaggaagtacattttcaacagagagaacaggaagtacagagatcttaaggcaggaacatgcctggtgtgcatcctaaaaagaatattgcctcagggcaaagatgatttggattcagaaagtaaatgatccttcgtgggaatgtgaatggggtggaggtgtactggtggatggtttagcggctgcacactgtgatatgagagggaggcagaggtcactgcccctaatatctttcccactggaccttgcttgatggcaaaaactcctattattaaattctcatttctttctatttaagcattattctctctaggcagtaactaatgtcttactgtgaactatcttaggggaacattcccctctgtcagtaggagcaagaccacatgtgacagttgggtacattctgtagagcagtgtgtgaggactgaccctcctttttccagccgggtagatagaacaaggaggagacggcctgtaattctgctgaacagggacagacttgatagctacatctgaagctcaagttatgtgtccttggttctcatctttacagggtattctgtagctgactgtaacagacaaaagtgatcttcagaaaataatcctgtcacaaatttttaaaccagtgcttattcctgaaagtttctatatcttaaaagttcctttgacaactgaaattaaaagaattttttccttcaaaaaaattttagagcagttttaggttcacagcaacattaagcagaaagtacagaattcccatgtacaccttgcccccacagtatcaacatcccacaccacagtgatatatttgttaccactgaggaatctgtattgacacatctttatcacccaaagtccatagtttgcattagggttcattcttggtgttgtgtattctataggttttgacaaaagtataatgacatgtatccactattcatactagatagtttcactgccctagaaatcctctgtgccttgcctattcatccttccctccctctctaaccccaggcaaccacttgtctttttactgtctccatagttttgccttttccagaatgtcatttgattagaatcatacagtatgtaccctcttcagattggcttctttcacttagaaatacacattcaaggtcccttcatgtctcttcgtagcatggtagttcatttcctttttagcactgaataatattccattgattatctctttgcgtactgaaggatgtcttggtcgcttctatgttttggcaattatgaataaagctcctatacacagctgcaggcttttcagctcatttggataaataacaacaagtccctttgctggattgtaaggtaagagtatgtttaattttgtaagaaactgccaaactcttccaagacaactgcaccaccagcaatgggtgagagtttctgttgctccacatccccaccagcatttggcattgtcagtgttccagactttggccattctaataggcatgtagtagtatctcttgttgtttaaatttctgtttctctaatgacatacaatgtggatcaacttttcatatgcttatttgccatttgtattatcgttggtgaggtgtctattcaggtcctttgcccattttttcatcagttggtttgatttcttactgagttttaactgttctttattttggataaaacagttctttatcagatatattttttgggaatattttgtctcagtctgtggcttgtcttctcattcccttgacagtgtctttcttagagcagaagtttttaattttaatgaagcccagcttctcaatgatttctttcgtagaccacgcctttggtgttgtatctgagaatccttcgccatgctcaaggctgtctgtattttctcctgtgttgtcttctgtgagttttgtagttttgctttttacacttaggcttgtaagccattttgggtttatttttgtgaaggatgtaaggtctgtgtcgagattcttttttttgcacctggatgtccagttattccagcaccatttgttgaaaagactgtctttgctccattgtattactgttgctcttttgtcaaatattgatttatatttatgtggatttttttctgaagtctctattctgttccattgatcagtttccctattcttttgtcaatgccacacttcctccttctcctcctccttttcttcctcctccttctcctccttcttcttttaagagatggagcctcactctgcccaagctggagtgcaggtttttacacctcagaaggacatgcagaggaaggtcctggaaggaagagaatgttatcctaacttgtttgctactggtatcaaggtgatagtgcagtcgagttggatgagcacagaatttagagccaggagactgattttagtcctgacttagccacttactggacataaccttgttaaagtctcctaacttccgtgtaaaacgttatataatacagactctcacaggacatttgagaaggtcagctcagttgaattctgtaaaagtgtttggtaaactctaaaatattaggcaattatttgtgcatgtgctgtgcagttcttatcaccagccttcccctgcctacatgcaaacaccagaccttctggaattggtgtctctaggctctgcatgaattatgcagtaaaaaaggcagttatttaatatgatgggaatccatctgatacaccactagaacagcaatcataaactgaaagacatacatgggtttaatcaatgagaaaaggggttgcttttttagagagaaactttctcctgtctttgggggagggaggggatgaaggacaggaaaatgtagtgtacaagtgttgagaagaaagctcaataaatgccattgtctaggccaaactacatatttgaaaactgaatctgaatgcctggaattcattaaggtggtttccctgtaggagttcacccactgcctcatgctttagctaccaagaagcctcttaaaggaaacagtagttaagggcttgtcttaaagcaatgatagattctttgggtttaaaaaaatagggtgttcctgttgtagtcctcatctttgttgtttgtttttactttttcaagagacaatacagtcacacggcttaatattcaaaaggcacaaaattgtggtgcatgtttagagcacagtcagcgtgcctgactccgtgttaagtgctttacatttagtcaccaaaacagcacttgtaaggttggtactattatattatctccattttgcagatgaggctgttgaggaacaaagagattaggtaactcaccaaagttacatagctaggaagaggcagaggtaggacctgagcccaggatgtctgggtccagtctacactccttctcactatgctgttttgatggatgtttattacatggtgcagagaaagcctttccctttgctctgtaaagagtgtagaatgaaaagtcttctgctttctttttcatcagtaatccagcttttttttttttttttgagacggagtcttgctctctcgcccaggctggaatgcagtggcgccagctccgctcactgcaagctccgcctctcgggttcacgccgttctcctgtctcagcctcccgagtagctgggactacaggcgcccgccaccacgcccagctaatttgacggggtttcacgtgttagccaggatgctcttgatctcctgacctcgtgatccgccagcctcggcctcccaaagtgctgggattagaggtgtgagccaccgcgcccggcccagtaatccagctttctactccagagtcaactagtattaccaattcattgtttttcttctagagatagtctatacgtgtataataaaacccagagttctttacctccaatttttcctttttctagacttatggtagctttctatacacaatattttatacttattttcgttccagtcaaaaatatgtcttggagtttattacatacttacctaaggagcttccttattctttgctgtgtcagtatagcactcccttgtatggatgtaccataatttatttaatcatcctgctgacaatttgtttccaaacagtgctgcagtcattacctttttgtacataatcattttgtgcctgtgcaaattaatctgtaggattcattcctagaagtgaacttgctgggtcacgagtatatatatatatatttattttaacctatctcttttagagatagtattttacaacccaaaataggtgacaattgtctatttattttggttctttcatcttgcaaacgagagaccttacacagagaatcatgcttttgacctctggaaacttcttggaaaatggaagtattaccttatctgcatacggtttaattagatctagaagtgaataacatataaggcaatgtcttgggtatttactttgaaatttattccgttgtctattattagtatatgatttcccaaaatgagggaggggaaagatatgaaatcatcttgatgcatgttaccttttataattgcagaccaatatgtatttcagtaatccaggaatataataatgtgttgacggctttgattatgctgacaagggtgtaaaagaattagctcggccaggcgcagtggctcatgcctgtaatctcaacactttgggaggccaaagcaggcggatcagttgaagtcaggagttcgaaactagcctggccaacatgctgaaaccccctctctactaaaaatacaaaaaaattagccaggtgtggtggtgggcgcctgtaatcccagctacttgggaggctgaggcaggagaatcgcatgaacccaggaggtggaggttgcagtgagccgagattgcaccactgcactcctgcctgggagacagagtgagactctgtctcaaaaaaaaaaaaaaaaattagctcagtgattattgaattaatatatgcatggagatgaacagtaaagctcttttttttttgtcagtttggctatttttaagtacaagtagtttctagtttatagatatcagaaaagaataaataatgtgcatttaagaattaagggaaccattttggggaaaaatgggccatttatagagattctatgggggttttttgttttgtttttgtagagtcagaatctcactatattgctcaaactcctggattcaagcgatcctcctgccttggcctcccaaagtgttgagattacaggcatgagccactgcacctgacctctgtgggttttttaagcagaaaaaaggaaggaactattaataacagcaacaacaacatcagaaggcaaggggcagagtcttgactgccacagtgacctgcccactcagtgtccctctcacctcaaaagaacttgtacttttctccttcagattttgtgagcaccttttgaaagttctgttgattagagttgtgttgatattaagatgcttatcaaagacagattatgtttagcaggtttaagggataccatgtagtaataatgtaggttaattcattaagattgctttccttttcgtacctggctgagatcatctattctaaatcacactgtgcacatttaatagataacttgggattataatatgttagaattggaagcaccagacctttaggtataattttagtcccaccccatttcccattttttcttttttcttttttcagacagtgtctcactctgtcgcccaggctggagtacagtggtgtgatctcagctcactgcaacctccgcctcccgggtttaagcaattcttgtgtctcagcctccccagttagctgggatcacaggcgcccaccgccatgcctggctaatttttatacttttagtagagatggggtttcaccatgttggccatgctggtctcagacttctggcctctgatctgcctgcctcggcctcccaaagtgctaggattacaggcatgagccaccatgcctggccccaccccttccttttatagaggaggagacactggattaagaggtgaagaagtgactgagatgggactgtgggatggctgcctccagcctaggcaatctgacatcccgtgcagtgctccgctattttgtctatgctgtggtggccccagggcagtggcatgtgggtagtggtgctgtaagtgccacacacaaacttcatctgttttagagtttcacttgatgtgatcctgaactcagaaaggaaggaagaaattctgtcttttcctctctgtactttgtagttccttgttcatagcacccaaaccttaggctgtattgtgacacatacgataatgttttgtcactgccgtgtgaacacattatttaaagacttatgtggttttaacttgtgacctttgctaccatttacatattgttttagtggcaaggagggggaaaacaagttcagagctacaactaacctacttacacataaacttttggctgttatttttgttagagatcagttatattcaggaaaatatggggaacctgaaagttatttcagtcttttgtccttttctcagacatggtaatcactaaagtgatcaacaatgctttatcctataattccaaaatcctaaaatttctggaaaatcttttggaattaatctgaactgatgtgaggctgtttatagtctctatctaatccacttagcataagtattcataacttgggctggtgaaatattaatttgtttgttttgggggtttgattacatctcagcccctggaggaagtattatgtaatatgtagtgtagcatctttctgatttctaaaaaaaattctgaattctgaaacatctagccccaaggctctcagttaaggaattgtgtatctgagtagatctttgaattatgctctacagctttaaaagtgctttcataacttaatctctgtttttcccaacagccttgtgaggtagataaggcagatgcattttgggaaagctcagcgctagggttggagcattctaaaatcatctgggttgaaggcagcagagctagagttagaagccctgtttaccctggtgaatcctaatccgtgtcccaagcatcatgtcttctgtgactcacatccatcactcacccaactgtgtggacttgacctctttatcctgtagagtccccataagtccctatagacatttatcttggcacctgtaaaaatatagttaacttaatatttatatgttggcctttcccttcccagttgtaagcatattgaggtaaatactggatatagttaatttctgttcctggtacctttcatggtgcctgtgtgaagccacacactcaaaggtgtgcagaaggaatgaactcagaagtatggttccatgcttttgctgctgatcaaacatatttattctttcattccacattttcctttacaaaaggaataaaggatttacatatcacctactttcttaaagatggaagaattgtaaccaacatgcagtatagctctgtgttggtaatataacagtggactacatttaattggaattgtttgtaaattaatattaatatctttatgttatcaatatatattaaagcttctgataagaactttaagcacttttcactatactcctgaccacaggatagcaactcagtggtgattttttatgcagttccactgaaattgctccaggcaattcacacagctgaggctgtataagtgcaaaataggggaagaaaggagagccaacacagtcttcctgagagtactaacatagcaaaagataaatgaattccaaatctgttactgccatctatttacgtaagttttttcttgaaataaacagcttttactgggtgggaaataatgtgtattttgtgctgacagggtgaactctcattgctatgtcaagcttaattttcccttttcttccacccccagtcttcatttattttcagggtgtaactctttgggtctccccactcttcttgagcaaaccttttgagagatttctgtttgtacttagaaggtgttttttgagagaataaggaaacggtggaggttggcagagaaaaaagaatatagaatagggttaaagagtggttggaaaatgtaactgcgtttcataggagcagggttatggtttgctcattgctttatctcagaatgcttgccaagtagtaggcatacaggaattgctggttaaatggatagtatttttgccagtttttgttgtcatcattattgtttgtttttgttttgtttcattttgccttttcttggaccattgaaagtttcctatcattcctgactgtttaaatatttaccttcttggatcacaagactgttctttaaactctttatgtaaacttatttttgactgtgtggggaggcttccttgtgtgagaccaggaggaaaaacagagatcatgctttttccacatggggatacccatgaccacttctactctgattcctgtaaaagttcaagagaagaaacaacacccacactagaactggtctcaaaggatatagcaaatcaccctgcaacatgttatacaactactgctcttttgcttattggccattactccttgaaacccaggatttacaagtcactactacctctgcatttgccctgaaaatggtcttctcaaatcactttagttctcttcctaaaacacaggtcagatcgtgtcattctctttcttgaaatcttggaattggcacaccacagcttgtagagcaacagatgcattccttggcataaaatttaaagtccttcacaagtagtcctcaggtgcctttctagcctcatttgctgtgtggttcttctgtaggagacacatcccaagcacccagtgataactgtctttttgtgtttgtgctgtgccctcagtctgcagtgacttccctgttcattattccttctgtgtctttgtccaaaattttctccttcttaggaggacaccagtcattggattagggtgcctactaattcagtatggcctcatcttaacttgattatatctgcagagaccctgtttccaagcaaagtcatattcacaggtataggaattaggacttgaacatatcttttttggggacacaatttaaactacagtacatggctctagatattttaaagagaattctgttttctgtgtttcagatcacttgaactagtgtctgtcatgtttcagggaagtaactgagactttggttccttgcttttctaatcttgatgagtagtttcagaaatgaggcctggcttcaatgctaaccaggcaaatcctggcatcatggaattttaaaaccaaaaagagtctgtataagtcattttgcttaaattttacaataagaaaaggtagacaaatcatcttctcttactgtgcctgaaggcataaagtggacataaataataccctgatgccaaggacagtgttcattctttatgttcagcaaaaacagaaatgaaataattcagattagaatacatttccctgaagtggtcagctatttttaggcaaaagccccaaggcttgttttcataccccttttgaatcatgccgagtggccccagtcatatgaagagatgtcatcagtaaagcaccaggaactgtggtcagtgctcttggaagctccacagtaactgttggttgaatgtagaagtgaatgtgaatatgaagagaatatgtgtgccatggagctaccaatagctcaagtcctgtgtataagggatggcagggaaaggggctgggagtgtgctgggaatttccatagattatctcttttaatcttcacaacaggacctataagtactcctaggggagaagttcccaaaactataaaaccggtgggaagcagagctgagatttgatcccaagcctgtctcattctgaagcactggtggcctttgtcctgcttctgtttcctttaccaaattatgcaactgttttttcctctactaatactaaaatgtcagtgtctcaccgcactttgggaggctgaggcgggcagattgcctgagctcaggagtttgagaccagcctgggcaacatggtaaaaccctctctctacaaaaaatacaaagaaattaaccaggcatggtggcacatgcctgtagtcccagctacttggggggctgagatgggagaatttcttgagcaggaggttgaggctatggtgaaccgagatggcgccactgcactccagcctgggcaacagagcaaaaacctgtctccaaaaaaaggaaatgtcaatgtcaaaattatatttatgtattaaaccaaagacagtattcatatgtaagaagaatagagttttcctctttttttttttttttttttttgagatagagtctccctgtgttgcccaggctgcaatgcagtgatgcgatctcagctcacagcagcctcgacttcccgagctcaggtgattctaccacctcagcctccgcactccagtagctgggactacaggtgtgtaccaccgtgcccagctaactttttgtatttttagtaaagatggagtttcaccctgttgcccacaaacgcctgggctcaagcgatcagccggcctcggtctcccaaagtcctgggattacagacatgagccattgtgcctgaccgttttgttttgttttgtttttgtttgtttgtttaacagacgggatctcactctgtcaccaagaccagagtcggagtgcagtggtatgatcatggcttactgcagccttgaactcctaggctcaagtgatcctcccacttcagcttcctaagtagctgggactacaggtgtataccatcacaaccagctaatttttaaaaaattttaaacagtctgggtcttgctatgtcatccagtcttgtctggaattcctgggctcaagagatcctttttgcttcagcaacctaagtagctgggattacaggtacgagccactgtgtccatcactcgtatcttataaaatacttttaaagcatttggatcaaaaaatgagacaatctgaaatacatacttttcccctctgtgtctttttaaaaatttttaaattaaaaaaattatttttagactcctgaatcagaacaattgtccatgatttttatttccatccttttttcattgaaaaataacatgaaacatttaataaggtgttatgatcatgattaaattttatctcttctaaagtagctgttttcagtttgatatttgaatatgtgttattcttcaaaaataaggattgaacaacttggttataaattataatgctgtcttggcaaaatgtaattattagggcaaaattcatttaaaagaaaatgcaaggcaattaaatctgattttttttacttttaacaaaatcaacatatgtactatgttataataatatatagcttcagagcctttttaatgacctcattttatttatttatttatttagagacggaatctccctctgtcacccaggctggagtgcagtggtgcgatctcggctcactgcaacctctgtctcccaagttcaagcgattctcctgcctcagcctcctgagtagctaggattatgggtgcccactagtgcgcctggctaatttttgtatttttagtagagatggggtttcaccgtgttggccatggttggccaggttggtcttgaactcctgacctcaagtgttctgcctgcctcggccttgtgtaattttaaaatttagtggtctgggtcatagtcatcagactgtgttgattgtaagtgacagtgaactaattccaggaatagtgcttactcaggaacagctggctttgggtactgccaggaatctgtttcattctattgctcacctctactttcctccacgcagacttttgctgacttcattttcagacaggcccttacttcatgatggcaaaaatagccaccaccaactccagggttaccatttacaagctgaacaactgagttttggggctggctcacacagccagcttgggtcatgtggccatgtctcattagccagacctgaaacatggactccctctggactgagagtagagggaagatggtttgaaaataaacttggcttattattatcaagattaggaggaaaggatgctgggcgtgataacttagggcacagcttgttgaaagaaggtacaaccagaactttatatgttttgccgtagggatttaagaaaacaaatctgctacccaaaaagaacatgttcagtattaactgcctgaaaaaggaaaagaccaaaaatgcacaatttgtgattgagtaccagacactgtattaattttctttaaaaatcataacattaccaatcctctgaggcaattattgccattttggagcacttactgtgtgtcacactttgtgtgaggcactttacgctttgtaggacagctttgtgagggcagccttaatattctcattgtactgatgaagaactaggaggccagaggcatttgggtttgaatccagatgtgtcttatttcatttatatcatctcctagttttacagtttgcttttgttagtctgtctgtgtgtccatctatcctcctctgtcctgtcagagctccccctcagcttctctaagcaaggccccctttcacctcgggcacctctccagtccattgggaaaccggctcaactctgtcctctgagcatgccaccagtgtctgtcccctttcccccacctctgctgctggagctctagccttcattatgaagggccagaactcttattatgaattctgtttggccttcctgcttccagtcttcatctcttccacccccattttccttaacagccagattgaactttcaaaaagtgcagacctgatcttatcaagcgtctgttttccttggcttctcatggagggagaacatgatcctggcccctgcctgccgtcctttccacctcacggcactcactctctggccttttttcttcttccttctccagtgcagcagtcttacaccttaccacctccttctctgttcctatggtgcgcatcatttgttttgcttcttcaggtctgtgtttacatgtcacttcaagtccttagggacttctctgtccctttcccctaccccttcaatctggaaatctgaagctgtttactgctcctttttgtacttttcacagtttgtagtgatacattcgtctgtgattatttgcctaacattccccactgaatcatgaactccataagggtggggaccaggtctgtctggttaattaattgctgagtctctagcagcaaccacagtgcctggaacatcacagacactcaaatatgtgttgactggactgatgggttaaaaactgagtatatccaaagcagtgcacttttaaatgattatcttttctgtagttccctcactctgtaatttattaagaatgaacctatgttttcctcagagcagttttatcccagttgcttttggtttgcttagaaacatgcttcctttcttgctgactgtaattgctagcaattccagtgctctacagtgatgcacttggtttctgaaactcctggattagagctagccataatcggggaagataataaattttagggtatgtaattcctcttaatttgacctgagtgtgggtgagggaaagaagagaaggctctaccgacttgctccaaatggttccctgcccaataacacagaagccttaacactcctttaactcggatatgctgtccccagaacccaggcatccaaatttagtcttctctgcatgtccttgtgatttctgactgccatctgtgtccaaattggctttggaaggagaagctttctctccagtgatttattatttaaagcagtcttctcagcccttatcatgaaaactggcaattttcatatggccctttggaatccacatacaaggctatctgtcccaggctcactggtgccccagttctgaggggatcactagccctgcatgcttgtggccttttgatgtgcacacaggcatggtgactgggaagcttatctgtctgtgatcatctcatgtgctgcagataacataacttcttttgccctttttaatccacagttggtcatgttcggagtttgacctgaatgagattcgcctgatagtttaccaggactgtgacaggagaggcagacaagtcttgtttgactctaaagctgttcaaaagattgaggaggtgacagctcaggtatgaaatgctgatttgctttctccttttcttttgtgcttttaaccacccttctgatcaatcatttattaatctatcatcttctctttgagttatattatacagtgccattaatggttcagaagaaacataagcaagcattgaatcctttaatcaaagccctacccccaacaggcatgagtatgctcactgctaaacacaagtgaaactgttagcaagtaatcatggcaggagctaagcagtgtactattaatagtactagaggtaaatttgctggtgagttgcaatccagtaagattttgatgccaagtgagtgcctcaaatgtaatgggaaagcagaactctaaaattcataaagtgataaagtgttagtgtgaagatcattctgtccagtgtttctcatggataataataagtagcactgggttaaacaaaattaaacagctttgcttatttacaggacttccatatgcaaacctgcattgttatcttcaaaaaggattgtttctcaaacccttctgaccaggggagcttttatttatttcccattttttttgtggagagttgggtggtagtggtggtggtggtggtggtgtagggtgggcgacaagcaatgggtagagtgaggatagagcagctcttgatcccttggaaccagaatgggaatggtaaagtaacatgtttaaggtgaggagagtctgatcctttctgggtcttttttggatatgataccagggtacttgtaaattcactttagacctttcattctcttttcagtatttgttcagatgcctacaaattaaataaatccacttgtattcattctttttatgttcaataagttgctacccatactgaccaaatactggcagtttgtagaatgtgcagctaagtaaatgaacagtttataacgcagtctttgtctcatcagggccaaggggttgttttcctgcttttgataaggatcatttctgcaggaaggaagtgtttggttaaacacagtttagctgggtggattccacagtgttttaaagtggagttctgccaggtggctaatcattacagtagttgttgggcttgttaggtaggtgaagggagggagggggaaaccaagaaatctctcaggtgattcactgtaggctttccaggttagatttgtaacagaaatttaggtgagccagcacttgaccctttggtggacaggagatggtttacctcttagtttcttgaattatttcccatttctctgaaggcctcacatggatggtctagttgagcagctatcactggggctgctcatagtggtggcaggtggaggggaaaagaaacacaagttttcaaaaggaactggaatcttcagtgtaccagagcactgataatgctggaatctggaaacataggctttcttagaagcattcatctaaccaaaaaggcatcttaggttcaggaggtttgtagcttgcccaaggctacaaaagaatccagtcagtgctctattcactacaccaggtggtttctccaattatagactgttcagcattgtactccagccaaagggtctagcagtctgaagcagtggcacctcgtgtcacttaggccctctgaggggctgtgtttctggcttaagtgagattgagtaacagctttatctttagcgtgttgagggagtgctgggtgctcaggaataatcaagtgccactttgaatgccatcattgctggagtgacagttgtggtccagcacattttgtgttttccttacgttcttttcccattttcagtccccaccgccccagcctcccttggcaagcacaaaacgtcatgagtttgtatcaagcacatgactgcaggcatttgcattagaccaccagtgtgactgtcacattggagattagataagctgcaattgcattcatgtttttttccaagcaaaagctacacaaggaaaaaaaaaaggcaaagaagactcagaatagaaataacttatcatagagggtgcaggaagcttctgtagggagtaatatgtttggggagaggtaaatattaataaaggtttatccttatacgtttgtcactgtgataaaaattagtggcaaactctagggaatgtatagtagagcatcctctgttgtctttaacctttgaagaccatatttccatcacatgctatgtaattcacagtagctcctgtttcagggttttggtttcatcccttacaaattcaacctcatgattttccttcctgttacctttaaaggagtagtagaggaggtgtgtcattaaaaacacaagtaggccgggcgcggtggctcacgcctgtaatccagcactttgagaggctgaggtgggcagatcacgaggtcaagagatcaagaccatcttggtcaacatggtgaaaccccatctccactaaaaatacaaaaaaattagctgggcgtgatggtgggcacctgtaagtcccagctacttggaggctgagacaggagaattgcttgaacccgggaggcacgggttgcagtgagccgagatcatgccgctgcactacagcctggcaacagggtgagactccatctcacaaacaaacaaacaaacaaaaaaccctacgagccagtctgcccaaattaatagttttgttttattagttccatttgcttagtaaaaatttagatttgaagcctcatctttctcctcatcaatgtaatggattatgactctacataatactaaaaagctaataatcaaaactcaaataaccaaaacagaggtcaattatgtgaattgaagtgtaaataatagttaaattattaaaagaggataaagtcttaatacataacctacctccttttgtctagaacccttcttcagcattctgccatcccaaaccatgtttttgtcattattggggaaaaaaaaaagcttctgttttttaatgcaacctaggcaccagaatgcttttaaaaaggaattcccaatgaagaactgttgacgaacctgatatacttagtaatcttttaccttgcctgtctctcttaacctagaaaacagaggatgttcctattaaaatatcagccaagtgctgccagggaagcagcagtgtcagcagcagtagcagcagcagcatctcttcccacagttcttctgggggatcttcacatcatgctaaggaacagcttccaaagtaccaggtacaaccatcccttctgtgggaatagcccctgaggttaaagttatttactgtaatttctccttgggaaataatgcctgctcgagggctctactccaggaatatgaggacaagtattcaacagagtactcttaaatgtttcacatcgatgttgtttttgctctttggcttttatctccaataaaaactgtaatcaagcagaggtaatacagcctactgtgaactggatgaggaagaaatattgccagtcaggtaaattaccttgctttgtttcctttgctctctgatccagaataataaacatgtactttccagttttgttataagaattcctaaggattctgggaatgtatatgggcatcctaagaaaatagaacataccagtaaaaggaagaaagccttgtatgggaacagaaagaaatggcaagatctaatctgagtatgaaggataaaaggctgatggcattttttacactgtgtgtgtggggtgtgtgtgtgtgtgtgtgtgtgtgtataaggataggggttaaggttattgagaaatattggctaacaagataaaaaggaagaaatgttttataaatattgaatggcaaaagaatattaattgatggaggatatattgaactttttcttaaacccatgtagaatcttttctactattttgctggaaaaacaatactagggaagttaccagcaaatgggtctggagaactttgttttttcatagttaggatttgtgccatgcatttgccctttttgagacacagtgctccagggtctcacagcagtctgcagtttaaaaagtatggagtagaattttcagcaggttgagaatcacagttggcatgtggcccttgtaccccaagaaaaagcagattataaatgaaggaggtgggtggaagttagtaataaagaatgtgaaaaccagttggtttctgtctgcatatagtgggaagaagttggtttgagctataacgagagagaggaacctagctgagcagggctgatagatttatctttctttttttttttttttttttttttttgagacggagtctcgctctgtcgcccaggccggactgcggactgcagtggcgcaatctcggctcactgcaagctccgcttcccgggttcacgccattctcctgcctcagcctcccgagcagctgggactacaggcgcccgccaccgcgcccggctaattttttgtatttttagtagagacggggtttcaccttgttagccaggatggtctcgatctcctgacctcatgatccacccgcctcggcctcccaaagtgctgggatcacaggcgtgagccaccgcgcccggcccagatttatctttctctttccgcctctgcaaccgtgcataagtaagtgtgtatttgtgcgtcagcgtatgtatgcttgtgtgtctgtgtgtgtgtatgtatttggagttttaaaaaaagatttggaagagtatgttaagggtgattcccatgtttttccttgggtggaaagcacactgacagagaatatagttggcaggtcggggtgcagaaccatggttgctttggtggcacactggtttgctcagcattcatacctgtcctgttcatcattgtgtcactagcacttagcacgggtgctcagaattctgcatcccaagacactcattcagatgtcactaggtgaatgaatgtattggggtatacgattctagagctccaggagagctcttggtctagagacaaagatgtaggaggtattctatgtaaataataatcaaaatcaaaagaatagttgaaaaggcgggcagttagtagggttgacctccaggcaaaaccacagtaagggatgatctgagaaagaagagagtcaaaatggagagtcatgaacagcatcaaatatattgagagaagtttaataaagcaaactggaaagggtccattggatttgaccaagagggaggaggtcatcattggagcagttgaactagtttgagctaagaggtaaagtcaggctgtggtagattaacaagccagtgagagtagaggaagaggaggcaggcagtccactctttggttggtaaaggcatgagaaagactggtcagaagctagaggggtcaaatgttgttgaaatacttttgtaaaacttcagagttatcagaccatctgttatcttttgggccctcataaaaccctatctgcagcaatgggcattttttattccacattgttaattatttggctgaataataccgaaccatatttttttcaggatgttttcttagtaccaagagaagagttacagttattttcataatttaatctttgtatttagagtttataaatggagataatagtaatctttgtttctcataacacaaataaaaatgaactctaataaaacacttggatcctaggtgatgatgttgtgtacagagaagaaatcacaaacattagtaatactttgggggggaaaataggcaatcgccattataagttaagattgtaagatgaccacttgaagctttgagaaatagttttaatcaccgatgacactaacgagattaataaacattattttctgttgcattgcatgtcatgttccatgtactaactttgattttgttttcttgcatgtagtacacaagaccagcttccgatgtcaacatgttaggggaaatgatgtttggctcagttgccatgagttacaaaggctccaccttaaagatacactacatacggtgagtctgggcttccttttctactagttttgagaagtggaacggtggtattgactccttaactcataaatttatttttcccctctccttttttcccctccacagttctcctccacaactgatgattagtaaagtcttctctgctagaatgggcagcttctgtggaagtacaaataagtaagtgtaggattttgcattccccacccccattttttaaagtgtgtatttctagatagactaattctttaagggccataaggcattttgaaatgacaagcagaatgagtccaaattaacaaaggggctttaaaagtggctactgtcctataaacagtgagtgggaaaagacctttgactttattaggtggccctaaagacaaatggctgtctttatatgttttgagtctccatctgttacccagtcaccaatttttaatttcctgggaaatcaaaaataaagaacaaaagggaaggggctacattattctgaaatatctgagaacttaaactcattttggcatattcattcatgtattttgaactttcaagcagaaatatttcatatacttcattttttaaataaaacaacaaaacaccagttgtactttgataagtttgaaagaagcgcttgttataaattaaaggacattcttaggggtcaagtaaaagctgttttttcttatcctgggaaattaaaaatatttctctatatatttgaataccattaagtgagtcttggcttactcttcaacaaaacagtttgaacatttaacattggaatgtcatgacttaagccaatatgagaatttttatttatttcttgcgagatttgtttttaacagacccttgggattacctgaacgtttattgcattaattcccttacgtgcagatttaagtaaaaattattttgccttcattatgctgtattattctcaaagtctttctgtcgtcgtttttgtcagctctacacacagcaaaagtctttaattgttaataaatacaataaattattaaaatctgcttccctcacatttttatgagtaattctttttagaagttgtgaaatgaaactcctgtaagaattataatttctgttgcattttattcctgaaaaaagttgctgaattgctcattgatgttaaccaagagtaaaaattaatttcattttgagagtttatgtaaaatacttaaaatgaatgtcaacaagttggctgtcagttgctaaagcaaaatgtagaaatgaataacagtatctcgggtgtcagtcactgaagcaaaatttagagtttggtgtctcattatattatatgaaattgttagaagtacagttgtttagttacacgggttgagctacctccaaaatagcttttgttttcttccaacaaattcacctgaagttgcaagtttaattccctttggtagatgtgagactttgtttataaagaaaagtattgagtgactgatcagtcgttgtctatatttggaagtctattagaaaacagctttagtagcttcttgacgtttttgtcctctttctccttttcccccccatctccggatatagcttgcaagacagctttgagtacatcaaccaagatcctaatttgggaaaactgaacacaaatcaaaatagtttgggtccttgtcgtactggaagtaacctaggtaaaatcagagatacaaacaaattctttctttctgaatacactattgtgggtgtgtgttttgctttatttgagtttgtcgtgggtttttttttttgcgttatctttaatctgtgtttattttttttgtatgtgtactttgtttgccctcttctatgtgtttccatctctaggtctgctgcaagcatgcagcagcaaactgctgcagggggtagctgaaggaggacctctccggctcacccggagtgcttctttctttgcaggtttgtgtggaatgctgagtacagtgtgacccacacatattaataaatcctgtgcaggttcttaggaaaaatcctacttgtgcctctctagaaatccaaggggctcttgtgatcacagatattggtttcaaatgcggccaaatccatggtgtttcgaaaattctgccaatgaacctctcttgtaaatgtcttcgctaatactctagtgtaagctgattttgatctgaaatgagcccttagtatttccaagaggattgtttttttctgatttttctgggcctcttctgctactatgaactgtttccctttgccttggtgtcttttatccatttattcaactgcatccttacctgcacggagtttcattaaaagtcactctaataagagcatggaagacttctctctctctctctctctctctctctctctctctctctctccctctctaagtagtgtaaatacaatttctaggttatttacaggtatagtcatcttggtgtctctgagatttaacttgtcttagcatgattaaacatgtgaggaacctccattactaacatttaaagttgtgagtatagcaaatggtattttcctttctgttctttgtagcctgaaatatgctaagcaccatagttaactgacaccctgataaaattgacacgctcctacctacttagagtgaggaaaatgcatttaaatactctctttaaaattgtgaaaataaacatgcttcaaaaaaatagctgtcaagtataataatcaggcagagcactgggctgcttgtccatttaaaacttcactacagcagcagcatatctaccttctagcacaataagtatacagcttaggtcaatctgaagcattcctagaagtctgtaatacttcagagtgttttccacagttcatgccagaacatgagtttttctaagtaactctacaataatactgtgtatgggtgtatatggaaagaaatggaggaagaaatatttgaaaatgagtataaatgttttctatctgccaagagagtgggttataaacagagaaacattttttgaatttatgaaatggttttcaagtatttctcttccctaagtcgcctacagttactaccaaaactgattataaagcattttgaaatacattgctatttaaatactactactaatgaggaaaatggctaaaaaaaattacctgagaatgtttattcattgcatcaactgcacgaatcatttattattcagagttttttttttaagagttgaacatcactcagaaaagtttgtatgcttacaattgaatacaggcagatttttatgagatggttacttggttctcttttcttctcatcatctttttatatatttaattttgccttctagttaatctctattaaaagcttatgccaatcatcagtagcagtagcctactttgaaatttaaaaattactgcagtcattttaaaaactttatctctgaagagcccaataacatggttttcttgttcctttatcttagcacacagcacaccagttgatatgccaagcagaggacagaatgaagacagggacagtggcattgctcgatcaggtacttgtactctgtttattggtttaactaacagagtgaactatctacagtggtgtggaaggtgggaaagtagaagacaggtagataaccctcatcctgttctttgttttttccttcctaagatagtctgacatatctaaagatctgaaactttaatgtacagtatccatgagtgattgtgcaacataaactagttttttctaacactcaaatttatatgagactaatgtttgttaagaaatttctttccagaatgaagcttccttgagcccattgtactagtaatgtgcttgcttgactgttgagtatagactcagaggaagagaagggtttgtggaagtaaatctgtcctgtgacagtgggaggaccagccagctgacctggtcaccgtttcttctgttctagagacatgctgatctagattttatcaggtacccttctctccttgcctcaaggcctaaacctttctgttactgcttttaggatctgttggtttcaccttttgtatgtgacctcttttgagttttgacttgtggttcagatctgagattttgtattataagagaagggtggtgaatgagtgaactgaaattcaaggactggaggtggtgtgtggtgctctgcttgatgaatacatatggtacaggcagcccctaccttccagtgagactaggagcaccctgctggtttctcctgtgatacatgacaccttcaacaaatgggccagccaggcgttgctcagactggatgcaggcctcacatgatgttcttcttggcctttcactcatttctctgtccacactactccaaggtccttgtgctcctgtgtagcctcagagccttttaacccactctgtgcaactctgctcttgtgttaataaatgaaatgtgatttgttactgagtctccagtttggtttacatatgtcacataatgtaaagtaatagcattttatttatggttaaaatcgatgtgttttggtgttcataatcttttctgtaaagttgagctgggaacctttggtcagaaactctcattgatcaggccgagcacagtggctcacccctgtaatcccagcactttgggaagccaaagcgagcagatcacttgaggtcagtttgagaccagcctgaccaacatggcgaaactccatctctactaaaaatacaaaaaaaaaaaaaagaaagaaattagccaggcgtggtggcgcatacctatagtcctagctactcaggaggctgaggcacgagaatcatttgtacctgggaggcggaggttgcagggagccgagattgcgccactatactccaggctggacaacagagactccgtctcaaaaaaaaaaaaaaaaaaaaaaaaaaagagactcattgatcagacctgtatcattttcacttacagccataacataaagtctgagaagataaagggaaacttatgaagcactaagtaaactgttttgcttttgtttctgtttaatggtgctgaagataactcctccagtctttgtgggacactgtcagataactgagttccatcagttactcaaggacaataagcatgtgtttacagagcttagtgtcccaaagctcggctccctgcctttgtaaccacctgcgacccagcccctgacaggactggcactagggctttgttatggttgactttcctggcaagaagatgtatgtgggccttaccagaagtcgcagagtgggaagcacagcccctagaaccaagatcactcttagtcaaaatggctgtcttagtgggtgacagaatttaacatatttgcctctgtgtggtgggagctctttagctctctgtgaaagaaagaaagatgagcaacattctactggggcccgttctgaacactgacatcacagtttctgcacagctgtaaccttatttatttgtttatgcccctttttgttgtggagaaaagattcagggaatttgagggacctaacaaagaaacattattaggaaaagtttggattttcctaggtaacttttcagtttataatatagttcatataaatggttcatgttgtacaggttgaaatcttacttgttttgtattcagattctaaattgctcctgaaactacttttccttgctctttgagaaacaggaaagttgggaagccaagttcaaattaaagtagaaagtcagattaaaagtaaagattcagccagatcagaatgcttttttgcagtccatgagaggaactagggactgaccagattggaggaaatgggggataggtgttgataccagtgtgaattttgaaagctggagaaggctggctttccttggtagtttgacttctattctgggcagtctttacttccagtctctggttctcctgttgggaggaagggagcacagatggtggagggggctgcaaatggccctgagtggcattttgctctccctgctatcctggtagatgtgtttaccttcagatatcatacctaggagtggttcagaagtcacagagtccacgtcaagactagtgtgagcttcacacctgtggtggcatttagcactcttttaatgtaagaactctttatgttcacactgtaatttgttcgctaagatttcatctccttatacccatctaaaattgtgtagggatgaaggcccaagttctgaaacagagcaggagctccaagtgtgagagttaagttagcagtagaagatgtagagaaattaaagacataaagatattatttattctcttttaggcctgctttttttttttttttttttctggctctgttgcccaggctggtgtgcaatggcacagtcttggctcactgtaacctctgcctcccaagcttaagccatcctcccacctcagcctcacaagtagctaggactacaggtacataccaccacacctggctaatttttatatttttggtagagatggagtttcgccatgttgctcaggctggtctggaattcctgagctcaagcagtccacccaccttagcctcccaaagtgctgagattataggtgtgagccaccacgcctagcctaggcctgcaatttttaacttcctgtccaaatagttgataaatggggaaatttttaaaaatagttttattttctagaagttttagacttacagaaaaattgagaaggtagtacaagagttcccatataacctgccctcagtttaccctattattaacatcttatattagtatggtatatttgttacaattaatgaaccaatgctgatacattactattagctaaagtccacagttttttttatttccttagtttttcatctaatagccttttctggttctgggacattacacttagttgtcatgttcttcaggcttctcttagctgtggtggtttctcagattttctttgtttttcgtaatcttgaggagtactggttaggtattttgtagattgccccattattagaatttaatgtttttctcatgattacactgaggttgtgggtttggggaaggaagatcatagaagtaaagtgccattttcgtcacatcctataagggtatatatcaccaacattatttatgactgttaatattggccttgattacctggctgaggaagtgtttgtcagtttctccactgtaaagttactctttatttcctcctgtccaggctgtgtactttggagagaagtcaggatgcttaccccatacctaaggggtggggaattatgctgcccctccttgaggacagagtacctacataaattatttggacttctcctgtgtggagatatatctcttctcccatttatttgtttagtcattattctactatggactcaaagatatttatttttcacttttggctaaaacccaatactacttcatttctattatttatttatttattttttggagacggtcttgcttgtccctaagctggagtgctcttgtgtgatcatagctcactgcatcactgcagcctcgaactcctgggcacaagggatcctccctcctcagcgccctgagtagctgggactacagtcatgcaccaccacacccagaatttttttttttcttttatgtagaaacaaggccccactatgttgccccggctggtctcaaactcctgggctcaagcaattttcccacctcacactcccaaaatagtggggttacaggcatgagccacagcaccccacaacttcatttatttgttgctcaaattgtttcggttttgaccattgggagctctctcagtaggctcccatgctcctttaacatacctctatctgtgaggggttggggtgagtattttgagcacttccttactttctggcaagacaagatgctccagagtcatcttatgtatttcctatccctgtcctagaatcagccatttctccacttatagaatgtctttggaaaaagcagcacaagctggggcaggtatggagggaaatgcatcctcattgtattctcttttggatattttgaatatgtcttctttacatatacagatccaaaagatagctttttaaggggttattctagtggttcccattagaaattttcaagtagggtcttgggagagaagagggttgggtgtcagccatactaggaggttgcatcagcaaagttcagtgattaatgggacacaggttatggaggaggaaggaggaaccaaggatgcatctccagtttctaacctgagaaagcgagtggaaggtgagcattatccagtacagggaaagcaggaggccaggtcagggagacagatactgagataattttctagctacagagattgggatacatttttacctagaaatgtctacatgttctccagttgtgcatagtcagctgtaatttagaaataggaaactggctctagtgagatgggttggagtagaagctaaaatttgtttttttgttgttgttttttttttgagacaaggtttcgctttgtcacccaggctggagtgcagtggcgcaatctcagctcactgcaacctccgtctcccaggttcaagctattctcctgcctcagcctcccaagtagctgaaatcacaggcgcacaccaccacacccagctaatttttgtattttcagtagaaacggagttttgccatgttggccaggctggtctcaaactcctgacctcaggtgattcacccacctcagcctcccaaagtgctgggattacaggtgtgagccaccgtgcccagccagaagctaaagtttggaagtcttgagtacatgagtagagtaaggttcagagggctgggattgagaccagtgtcatcaagccttgtctattgacctgaattcagctttaaactcttcctcgtcaaggtgttcacatcattgataagaaaaatactttttccattctgtctgcaactgcatttcctctgttcttaaaagtggtaaaataaagaaagtcagtataaggagaacttacaatatatacttttaaacatttttatttaaatgctttgaaatgaactttcagggtaagaatctacattatcatagtgttcaaataagacatgtgttttggtcactctgcagatacaggatgtataaccatccaaaatttggtgtagatgtcaagattgatgactctacatgcacacaccaagaggatatgaaaaggtttattactcacataatgaggctgttctggggagacaacagggtgggggcttctcaagctggttggagaatgtcttcagagaatgggacaggggattacactggggattttatgatggttgcgagataaggctggggtgagggttcctgcatatggtttgaaattctcactggtaccaaaggagtgagcacctgggctttcctcatcagtttgcccaggtgtggagcagaaagggaagagggagaggagggtaaagcttaaaagctatcaggagttgaacatcaagaaacaagtcaggttctttattacagtgtgggaccattgaataatgaaggatggcatcccgtttgtacgtgaacccttcaccaactgaactgatagagtgctttgtagagaggagcaagagcaaaggagggtactgtttttatttattctttgtgtcagggaaaaggctgtgacaccccattgaccttgcacaattccatacaggcaaaggcttaagctgcatcttatctgagccctggcagtacaacttgatcctcttggaacacttccctaacttccccgggaggctgtcatgatagtttctcatccactccagagttctgatgaggtatgggactttctgccctacccgcctcagactagagctgcagtatataaaagcatgtagctgcagtctagaactgactccccagcaacgggatatcccacaacttgccttgtaggcatctggccccttttgtgttggtgttgtcctttttgatgtatggggcaaagatcactgggagctggcacctttggcttattcttcttttcactgtctatgtaagtaataaactatccaaatctaaaagtgcctggttgtatcttaaccatcgaatcttggccttggccttagccttgctttgccttgtctttatatatgtgagcttgataatctgtagtgtggctcagtttcttatttctttatatttctcctatttcagatgtttggtattttcctggcatggatatttatctttttcatttccacaaatttacttggtcttttgccttagctttttcctttctaaatttgcattcttacatacctgttaaagaaaaattagaaagtaatgaagatagcaataaaaactgtaagggataaaggaataaatctaagaaaaaatatgtgatactggtattgagaaattgtaataacttatattaaaagaagacctaaataaatggagcgatacatcaaattctgcaaattaatctataagtttagtgtaacttgaattaaaatcctttgtgaagccagactaaataacttttacttaaatgaaataataaaggaccacatttttatgccctccgtaagtcttttgtagacacctctttcttagagcccaaactataaataaaagacacagtacactagaataatttgacatataaatgcgcagagtgagttggttaccaaggtggctagcatttataccttagataaattaaaatttaaggtgttttagcatacaacatatccacgtaacaaaactgcacttgtaccccttataaatttttaaaacctttgtataaattttttttaattatacaaattttttaaaaaggaaaaaatttaagatgttttgaaatcaaggtggtaagaacattggctttttattaaagggcctttataggaattttattaaaactttaaagtacctgtttggcttttgaggaccctttaaagtcctaaaatcattttgtgatttgggaactataatgtattccttataatttgattttcctattaacatttttggtttattttaaatgaaattttcctgctagacaataattacagctatactcatttaccttttaaatgctcctgtgtttgtgtgttgagaaatacaattgctaaacttcgaggaaccttgtatttttgccagtgtttcaagctaaaacttgaagataagtagtgtcatattacagtaaacaaagatcattattgtgttgtggatgtaataccccctgcgtcaaacatatataaaaagtgctcagattcagagccatactatcacttatgccatccaaaaaattgtttttaatgaagacaggggaaaaaagaaaatctaaatgccgtatatactgtgttggccacaggaaacttttaacaaattcagtatttgaattctgtccagaaatgtgtttctctaatgcttcatttctgtcacacttgaagagatgggtatcactgtcatcctgcacatactgtttgctcattcttcatccagcagcgtttcttgagcacctcatgtggcggacatttttttctaggatatgagaatagatcagtggtcaaatggatattatccctgatctcacagattttatattcaataaaggagagacagataatagacaataaaatgtaggcaaccacttaccactgaggaaaagaaaacttatggaaggcctctctgagaagatgacatttcagctgagacttgaatggcagtagggaccaactatgtgaagatcacaacaaagagcatcttaggtacgggaagggctagggctagtgcaaagatgtatcgtggggatgggagagtggtgcagaatgagcctggagaggaaataaggggtctgatcccactgctacattttttattttgatgggattgtttccacatgtatttgaatggctgctgaagacagagaagagttaggagttctctgcagcatcctttccctagatgtctccttgcaaatgaaaatgcttggcagggcatagatctgttctagggtcctgccctgatcatttgctgtagccctatttcctggacaaagtctgagggtgctgcctgtttggaaccgtgatcacatttttcggcagaataaataagccaacctcaaaactttttcctttgaagaaactggagctgcttctgagtgcttgacttctgcaccttctttctcgacttaccacattatgtggttatgttgttaaatccttgaagacttttgtttgttcttcttctccctcagagtgtgagctccatgagggcagaaacctacccaatctgtcatattaacagatctgttcccagcagctcatatagtacctggcatatagtagatgctcaatgaatatttgaatgagggggggaaaataaatccatccatatatataagtaggagtatgcttggattttttttggtaaatattgatattatctggttcttttcatataggatgtctgggatgtcctccctttgagccttttccatggctggcttttgttggcatttaagtctcagttgagatgacccattttcataaaggtgatgtcgaccactgattaaagaatttatgtctaccacccccaaaaacctttgtgctagttatttagagaaaatcatggtaacttatttttatagtagttaccactgtctgaaataatcttatttattccatgagtgtaagtctcttaagggcaactactctgcctatgtcccttcagtttccatcctaggtccctagcatggtgcaggcacttagtaagtgttcagtaaatattcgttgagtgaatggatttgatttaagagcttcagggccttatttggtcaaatctaaattctttcatcaaataatcactacagtgttttctagtaaactgtcacaagtagcaaaaattttttttcagagaaagttaaacattaatcttgaacttgattggcacatgccaggaacagcagcaagcagcattttaaaatctttagattgattctcttttcttgttgttaatctctgcaggtataaatggatgctagttgaagatacctccttagataggagggttgggacaaaagcacagttgtgtttaagctgggcgttaaccagatataaaatgttaacagtaatctggtgatgggactagtgttaattttaattttcttcttaatgcacaaaactgccaaagtctttgcaacctatatgcattaacttttttctaattataaaagtattgtaaaagaaaagctcctaaaaatattaaggaacatttagatatagcacttttgaaactgaaactgagcctgtgaataatttaactaaaagtcttggcatttgataactgaggtaccaattggagaatttctttatccagtacacagagttaactggaggcacagctagcactgaactcatgcaaaagttcttttcattatcatgtagatgctaggccgtattccaaaggtagtgaatcaactaggggagagcccatgttgctgtcttgtctttttctttttaaagagatgaggtctcactatgttgtttaggctggactcaagctcctaggctcaagcgatcctctgggcttgagctatcctcctgcctcaggccaccaagttactggacaacatgcttgcaccaccaccttcatgaagctttctttttaaacaagctccccaggtggctcagatgtatactagcactcgagcattgcatgcattgcatcagaaggccctgccattcagatagtgagccaggccaacattcagatacactgatgttgactgaatccacccttttgtcatgaaaatggcagttgttttcaggttaaggttagtcctcttgcatttgaaagttgtactgaattgttatctagagtatatgattaacaatgatgtgccacagcacttttacataaaaatcttaaaatacttttgatgaggaaacgctggatagcactaagccaacactgtaatataaactgtctcatttgcatgccataaaaagtgtcattcagcaggaaaaaaggaatgttctctttgattttttgccttctcttgttatgtctcttttacaagttataagttcttctcataattaactaattagaactaataatcttctagtacaccaagttgtcttacttggcccaccttttccgagaatgattagaaggagtgaaaagctaacatttatcgtgtgggtgactgggttaagtgttgtatgtgtattgatttgtttaatcttcacaggaagcttatgaaatagctgttttttcagatttttctttgatctgcaacccatgctaatgcattttacatcatgatctagtaagaaacatctttatatattacagagaattttcatggattaatattaacagtgcaatatactctgttttcttttctgtttttttaaatgttggttttgatccactagacaattcagaatccgctagcagatagcagctttcatgaaaaatactgaggtgtggtactttattgtccccgttttacagatgagagagctgacacgttaagtaaactgctggccaagtgtcacagctactagacacagaagcaggatttgaactaggagcctggactcttactcagtttgctaacctgaattatataatacagataatttccagaataaattggacctcagggtcttctctgtcttgtgttgtaggggcagaaaggttgtgataccttttctcacccctcttaagggtaatagctgacacacctgtaacaaaatacaggttaacaagagaaaagcgtaacaaatgatttaatcaaaattttacgtgaagaggaggcagagcaagatggctgaatggaagcctccaccgatcgtcctctctgcaggaaccccaaatttgaaaactatccacacacacaaaaaaataacttcataaaaatcaaaaatcaggtgaacgatcacagaacctgcttttaacttcatagagggtgggagggtaggcgagacagtcttgaattgccagcgccacccctccccaatcccctggacgtgtggtgcagaaagggaatctgtgcacttggggagaaactttgcattggaatgcagtgctgccaacaccaggcagagctcagctggtgcccacggagcacttactccagccctagccagaaggaagcgcccatcccagcagctggaacttgagttacagaaagccttgccaccacggactaaagtgctctggggtcctaaataaataaacttgaaaggctgtctagaccacaaggactgcaactcctgggccagttctgatgctgtgctgggctcagagccagtggacttggggtgcacacagcttagtgatacaccagccggggcaactaagggaatgcttgtgccaccaatctcccaaccccaggcagtgtagttcgtagctccaggagagactcctttcttccacttggagaggagagggaacagtaaagaggactttgtcttggataccagctcagacacagtaggatagagcactgggcaatgtcatgaggtgcctattctaggccctagctcccagacaacattttcagacacagcctgggcacaaaggaacccgctgccttgaagggaaggacccagtactggcaggattcatcacctgctgacttaaggccctgggtgagactctgagacgtgacatgacctagcacagtcactgctgtggtggctttgaggagaggccccttatgcttgagaaaacggtaccaggttggccatagtggggtagagcaccaagcaggcacttagggtcctcagttccagacattggctcttggacagcatctatggacctgccctgggccagaggggaccccactgccctaagggtgagtcccaggcctggcagcattcaccataagctgactgaagagcccttgggcgttaagtgaacatcactataggctggcagtagccactatgggcccgtggtggtggtggacatggagagagactcctctgcctggggacaggagagggaagagttggaatgactttgtcttgtggcttgggtgccagcccagctgcagcagaacagagcatcaggtagattcgtaaggtttctgactccaggcattggctcacagcatctctggactcaccagggggaacttgccacctttgagggaaggacacaagcctggctggcttcacaacctgctgattttagagccctaggtcttcagcaaatacaggcggtaaccaggtagtacttgcagcaggccttgggcaatacccagtgctgtgctggcttcaggtctgccccaatacagtctcaatggtggtggtcacagggatgtttgtttcacccttcctccagctctaggcagctcagcagagagagaaagagactccatttgtttgggacaaagtaaaggaagagaacaagagtctttgcctggtaatccagagaattcttctagatcttatccaagatcagccaaggggagcacagtgtcagctggcttgttcagatacagctgcagtgaccaaagacttagatcacaatacccaagtcccttcaaatatttggaaagcctgcccaagaagggtgggtacagacaagcccagattgtgaagactacaatcaatacctaactcttcaatgcccagacactgactgacatctacaagcataaagaccatccaggatcacgttacctcaccaaatggactaaatacagcaccaggggccagtcctggagagacagagatatgtgacctttcagacagagaattcaaaatagctgtgttgaggaaactcaaaattcaagagaacacagaaggaattcagaatcctatcagatatatttaatgaagaaatggaaataattaaaaagaatcaagcagaaattctggagttgaaaaatgcaattgtcatactgaagaatgcatcaaaattttatatggcatgggagccttcagagatacccaaagacccaagggaaaactgtccctttttatgcttagatttgatgaaggagtgggtagccaggtagaattgtaattggacaaaagggggttgatcttatagtcacagaccaaaggggaaaacccacctagcaagggcccatcctgattcttcttgatctctctgtgtggcatttcttcctgtcaggtataggactggaccccttctggaattaagggtcttacgatctactttcagataaagtaggcctaagaatttccttatagccagctcttacatagaaaggcaagggaatgttaaagtaatatttctaggtttcatggcgggctttgggggaaaaggggatctagtttctgtgacttgccttaatgaagaggaattttagtttctgtggtttgccttgcagggaggagggggagcaggagaaagaaggtcaggagaagatctgagacagacttgacttctgaggccttccagtgtcctttggttcaaagtgctcaggatgccagggcaccatattttggggtatcattttctgagccctaatactgtgacaggagaaaagtatttatccagcaagtaccatctgtcaaccttgttctctgcctgccagaagttgatttgctcagcataagggaaggagagaggcaggaccctagagatgtgggagggggcttctggattctgtaggggactttaggaactagggggcaggacagaaacgtctaattaggatgttttattaagtaattttgtgtgactccaaggaaaagctctcttctaactcctttcaaaattctcagaaaaattacctgttcactgatacttgaaatgtggatttggttttggggatttaagtctggtctcaagatggcaaccaggtcagcttactggggccagccacatgtaacagtttggttaaaaaaaaaaaaaagtgccatacgttcaggaagcatttgctaattgcctactgtggtcaaggcaccgttatgggtacaatggatgcaaagatgattaagacctaccaaacaaattttctgtgaatatcagctagataaaaggaaaagcatctcagagacctctgctttggaaagaaacttgagtcatcatgttcattgatactattatagacttgtccaccacttaccccagttgcctaccacacctggcattacttattagttgatagcaaagtaactcctgtagtatttaagagctcaggtcgggaagtcaggttatttacatttgcctacaaaagtataaatgtaatagttcatgtggagacactgctttatcaagtgatattcatgagcatagtatactgtatttaccaaaatcaatttcctttgccctgtgatttgtttcagaaaatgttgactggccatctgtagcaccctattttattttccactggactgagtgacatttcaatgtctaattccttagccttagggaagtaaaagcagaacaagtctgttttcttccattctttcaaaccagtagatgttcatcaagcagcttgacttgaaagaaaccctttgcctacctgagagggactagtccctcctccctgcctgttagaaaagtctgggatggcactgtcagctcatacttcctgagacacaggtgtaggcatctaatatgtagcaggaggaagcagagaaaggttcagaggcaaataagtaatccaagcagaaagcatattggagagtagaggtttctttttcacagacaacagagtagcagtgggggctggagggaaggaggataagtattgtatatatggagatgaagtttgggagacaggatactagatggggaaaaaacttatttgcctaattttacctcaaagtatagagtgaaggattactaaggaggaaatatgtgtaaagtaagcattatgtatggcattagttacctggtggcaatatagttatgttgtgtggaccattttagtagaaatctgcaatctacagtctgagcaatgattattttgcatttgtaatatgggcctgctaatttgtgcacttgctacatctgtgactcttatttcgtttaatttgtgttcctttttaaaggatgttttctttgctgttcagaaatcttaggaagagagaaattatagtctccccctgctggatatgactggtagaacctgaaattttagattacttggcatagatattttttttccaatttttggattgtattaaaatacatataatatgaaatttaccatctcaaccattttattaggttggtgcaaaggtaattgcgggttttgtcatttttttagtggcgaagtgtacagtttagtgatattaaatacataataaatgtagagttcagtgatattaaatacattcttaatgttgtgcattatgtagctacatgaggactaattgacctcaactttcaaattccaaattcttcctacagcctcactaagcagtcttttgatcacacctttcccatctccaagctcctctacatcttcttccagcagttaccagcgccgctggcttcgaagtcagacaacaagtttggaaaatggcatcatcccaagaaggtgagttgcaagtttcctcttgctgagaaaagtaggagtgtaggcagcttgatgaaactggcagggaggctgttcgtgcctattgtcagtggaaaaaaaaccaaaacttttttattagcttcagctgagcctgaaagtttacaaattggaagttctaaagggaagaataaataaaagctgaaattttaaaatctcctcctttggaagacactggggagtatctgggtagttgtatcatgttgagctagattgggtgttcatttaaaatggtgtgctctctttaaaatgagtcccttccagatgtagcttgtataagtaatgaagggtggatcaatctcttccttggctacagtgataccagtgtggtattcaaaaatatatgaagtcaagggtttgtgatatattctctttgtaaaatgtaaattcttcaactaaacagatatgaacatgattttaaatagagatggcatctaggtattttctgtctttatttcagctggttttgtgtgcaaaatgtacatttgatgttacattcatagcttccaacttgttcttcctacaatccaaatacttgaagtggaatttttatatgtacctataaaaattcacatgtcaattaactgatttagtaaattgactagtactcaacatacgtagagatccgtgaaggtataagacagttcagctatgtgcctgtacttggatagtttacaagatggtacatgataaatatcacagggagacataaagtgccatgagactcaggatggagaaaatacagtgatggtcatggggggaattagggagcccttcctggaagagatgacactgcagggacaagctgagaaactgaggggtcaggatgtgtgagcagcacatgtcaggtggcttgcctcgcttctgttcctttcacaatcctagggagctagctggaaagaaaaaattatagctttgtcacccatcaagaagctgctttttggttggtggactttgaatgagatgattaaaagcttggaattttgtgtgaacacaagtcctagctctgtcactcactagatgtctgatagaataagttaacctggattctgagtgttgcatcgtcatctgcaatatgataataatactagcacagcttccgagtgtggctgggagggttaaatgagataaatcaagtccggtgtttagccaagacataggatatgggcaataaaatgtggccaatgtgaattatttactattattattgctgtcattgtcattaccattactgcaactgtcaggagacggcatcgccaccatcctcactgtcattatgacagcttctgtgattggaagagataggtcttggaaaccatcctctttcaacatttcttttctgaaaatgtttttttatcccttcaggtttaaatccaaagttgaaataatacacctaaaataagtatcttacattcagaaaggttgtgaatatggtcaaggctggctacctagtttatgggccagtgcaaaataaaaatgtggtcctcttacccaaaaaacaagaaaagagttattaaagggactaaaaagaaaaaaagtttttctttaagaatactttatatgtaagatataatagagatgatagtgatagatgaataataatataaactaataaattccaaacataatatttttgatgtcataattttatattataatatcattatgtgatatcttgtgttgtaagccttttctgcaaatacatttgtttagtcatcaaagtttatagttttagcaacttggctttcagtggatataattgaaagtgatagtcactcctggcaaatgcaaggtggcaaataatttttgataattttttacttggagaaggatctttctgctgatgcagtcttacatagctttatggactatgacaacatctggataaattttttttattattattatactttaagttctaaggtacatgtgcacaacgtgcaggtttgttacatatgtatacatgtgccatgttggtgtgctgcacccattaacttgtcatttacattaggtatatctcctaatgctatccctcccccatccccctaccccacgacaggcgccggtgtgtgatgttccccaccctgtgtccaagtggggacattgttcagtgcccacctatgagtgagaacatgcggtgtttggttttctgtccttgcgatagtttgctcagaatgatggttatggataaatttttgataaactttcaagatgtaaattttagtacatctggatcagatgattcttgttaaacagttttttaaaagatttaattcttcacacaaatccattttgagtaagtctgaatttaattttagatgtaaatttatacaagcttattttaatatttcttctgacatttcctgtaacttgtggagatcttacaagaaactaaaaatgttctcatgagttatatataattcaaaaagcctgtttatgcattctatcactgtgtcctcaattacaaggaaaaattaattttaaaatggccttcctctttaataatttgttcatctgaagcttcatatgaaaacagtgtatttttttgtccagtataacaatctttacattcaatttctatttctatgcctatgaatatttactttgcagtgttgcagcagttttcaaaaacagagactaaactctctgcagaattataataactccctgatattctttattgcaatgtccccatgtaggcttttactttgtgataatttactgtcctggtgctcaggtcatagagttaaatatctgtgcagactctatagggacaggctccggtgactgatgggcaaactggcctcccaccctggttcctggagctaccagagtccctcctctctcctctcccctatcacccacaaccatggctactgcagcttctgttgtcaccacagtcacagccattagtgtgggtccaagacctggcagtgccgctttagagtcttctaacaccgtgtcctgccccaggcttatgggtatgtgcctgactgccgggccagttgctcggtgtctgggctgcaagccctgggttctgagttcatccgtgccctccccatcataagggtcatggctcctgtaacaaatacaggttaacaagagagaaacataacaattttatttagtcaaagtttcacatgacatggagccttcagacatgaagattgagggacccaaggaaaactgtatttttatgcttaagttcaacacagaatggactgccatgtagaaatgtgattggacaaagaaatatgatctaatggtaatagacttaagcaggaaaacccagcaggacctgtcttgtcggaattctttttgacctctctgtatggcattccttcctcccaggtagagggtaagacccctccgaaatgggagggtcttatgatctattttcaggcaaggtaggtcagagaaattatttgtgaccagcacttacaaaggtgggagaaagttagaatagtatttctataataggttttacagttagctttggggaaaaaagaggctcatgtttttttgatttaccttggggaacaggaatcttagtttctatgcctttggggagaaagaggagtaggagaaggaagggcagaataaggtcagaaaagcaaggtcttgcttttgagcccctgtccttcagttcaaagtactcagcataccaaagtgtcatactttggggtatccttttctgagcttcattgtctcattagacttcatccgaacacatgcttcattgtcccattaaacttcacttacagcacaaaagtccaaagataaaattatttaaaattcaaaatggtaatcacagaacattaaatgaagcctggggcccttgtgagaggggggacgctgtgcgtgtggggtcgcatgcccatgcagccagcccttaatagagtactgctgaacaccgagaacatgagtgtggcagacgttttgaattgattactgtgcccgtgaagatccctttttttttgagacgggaatctcactctgtcaccaggctggagtgcaatggtgcaatctcagctcactgcaacctctgcttcccgggttcaagcggttcccctgcctcagcctcctgagtacctgggattacaggcgtgtgccaccatgcccagctaatttttgtatttttagtagagacggagtttcaccatgttggccaggatggtctcgatctcttgacctcgtgatcctcccacctcggcctcccaaagtgctgggattacaggcgtgagccactgcacccggcctaagatcccttcatttaaaggatttgtagttgatctctcccttttggcagatatgtggttgggaaaattagttttttatgctagagacaggagaatagtgggtaccaaacactatgattgcttctggctttgacagaaaattcatggtaattaaaaatgtccttcctaagagagttaaaggtagcagggatgatagtcacagtttctgttttttgttagaatcgggcaacactttattctataaaatagaatgaatgttttcagtattcacaattcttaacagttggctccacgctgacctcagagccccctgctgtgccaagtggtaggctttgattactggatggggaatggggcttgggcatctaacagctaacctcaaggattccatcacttaccgaggcaattgaaaccctaaagagcaaggtgtaatgtcccaggaagccttttgatttgacttattaaattggaccaactttataaagttgctgatgggatgttctttgacctacaaaacattaatttcatatagtccaatgtaatacataggttcagtataagttcaaaactgacataaataacaattagactaaggagtcctgataccagtgatagattattgagatgtacttaaatagccatttttgctttaattatttatgatcttgaagtacttacaatgtatataaatgattatcgataagtgttaacaaaattctatttgatttctttattaggaaaaaaattgtatgtagctgcagcctttccttgactctcagggctgtcggttgatcagactgcttccagctcctttcctcagtgctctgcgtggcatgatgcattgactagcatgagcaccagcagacagattaggcatggggtcagaatccctggtcattgccagtatccaagtcatgagcctagactagaagataggaatcctgggttctaactccagcattgttactaagaacctttctgttcctgaggaaagttgaggtagaactctgcctcagtttccacatttgcagtacagcctgtgtaccttctctggtgacatggagataaagtactgatgaagtactgggacacacacttaaatttttgaaaacattcttaaacatcattttttgtagaataatttctaaattataagtaagatactacgtgacctgatttattccacgttgcatggttgatgcaagactacagaatgaaactcagttgatttagaattcagtggagggttatggtgaagcaagtaagttctccactctattatagctatggaagtttttcagaaatttcagcaggtggcactctctcctacattaaaactgatgagagcattggctattgtttatagggtggagatgttgatgagaaactgtattgggttcagtgtttattataatttgattattaaaggtcaagctggcctaaagatgagtggactgatacagtcattttacttttgaaaaagaagggaaatgtaagatgacagacaaagtggaaaggattgcaagcaagccttattgtaatataaactcagaagaatttcctatacagaacagaaatcaactactgtagtgcaagaaaacaaggctttagtgccagtaccttggtaaagaagagagaacattgtatgaaattgtgtgaagttctaaggaaacctcaagaattttctctgatgattagaatccgggaatttcccagggaaagcaattgatggtttattgtaatgtgtagcatttataacagcaccatgtgccatcagtaacatctggagtgaaaaccttttactgatttaccaaccatacctacatctccaggatcttgcttgaagttaagggaaatagtaacacataatgaggttagaataagatgtctatctcctttcctttaaaaataaaatagccaggtgcagtggctcacggctgtaatcccagcactttgggacactgaggtggaaggatcacttgagcccaggagttcaagaccagcttggacaatgtagggagactccatctctaccaaaaaaaaaaaaaaaaatgtatccgggcatggtggcatgtgcctgtagtcccagctacttgggaggcttaggtgggaggatcgcttgagcctgggaaattgaggctgcagtgagccatgatcacaccactgcaccccagcgtgggtgacagagtgagaccctgtccccccaaaattaattaattaatttaatagctttcctgaccataacacttttggcatatgtatgtttaataataaaatctaggtttatttgaaatcatacaagctatgagtagagccctaagtaaataagttgaagaccagggggcagaaggctaattctcatattctgcccagcatgagtaattgttatgttgtaatttatagtaaagaaaatggaggaagcagttcctttctatatttggcagagataggagactagatgatggagttagaaagagaaaatgtatcgccagtctagggctctcatttgcaatgttaggtcctttgtgttggtgtttttgtaggaaaaaactattttatttgtactcttgctgttagtagctatttggtagctacactggcttttcacagtagttaagtaagagacatggttaggccatttttgtgaggcttaccccacaagacaaattaaatatatatttagaagttttgggcttcgtggctgtcatcatagaagccgagtctctcaaaagaatcaggttttttgaaaattttactgtagcagaagagaggtaagtgtttctgcttggaggattttcagagagcttaatcatatggcttaatctgagcatttagaagagttacttgatctagtagttttaatagccctgggaaagtaatcctggaagtaccagtacatgttcaaatgtttactcttgttcaatagaataccacgtagtatcattcctcttttgatgtcttatctattggtatctgactatgttttggataaacagatatttcacattccttcctaaatatcatcaatttgacataaaacgattcaaaggaaaaggacaagagtaacaacgggaaatttaaattacttgtagctttcatttgagcttctttccatgttaggataataccgtgtggcaggcaagctgatgttctcatcttcatgccagggaattatagaaaagaatgaactaaaggcagagatactcttagttatgactgaatgttctgggtgtcatccccagtcattacagttgaccttcagtgtgactcactgatgcatggcaacttttcaaacttatatttccctccaggtcaactgatgagacattcagcttggctgaagaaacctgtagctctaatccagctatggttaggaggaagaaaattgccataagcatcatcttttccctatgtgagaaagaagaagcacaaaggaatttccaggacttcttcttttctcattttcccctgtttgaatctcacatgaacaggctgaagagtgcaattgaaaaggtaataaggatgtaatccaaagtcaaatagagaagtgattgtggggctttgaagatggcagaatttctttgccgatgtatcagatgtctttcctaaggaagttaaatcacctgtagcagtgataaattttaggcatgttgatgttagttaccagatactgggttaccttagggaaggaaatgactgctttttcgtgactgaaggcattattaccttgagtgttgttaattgattacataattttttttattaatacagcccagtagataagttataaaatttcttctcagtaatttgacttgctttctcttcaataaaggctatgatctcctgtaggaaaatagcagaatcaagtctccgagtccagttttatgtcagccgtttgatggaagctctgggagaattcaggtaaagtggcaaagtttggcaaatccaacaggagatgtttatgagcagccatggataaagataaactgtgacttggaagaattgggggcctggcagttattcctcacttttgtggttccgcccttcaagatggaaacagaacaaatgaagcaaaaaatttaaataatttaccgctgagtaatcctcactattgctcaaccgacagtccctgataggattgtttttaacaggatgaatggggaaaactaatgttcaggtatctctcaccagtctattcattatcttatgtcagcctcacaaaagccctaagcactactaaccccattttacagatgtggaaacttgagttcagggatgcttattcaaagcacagatggagaggttatgcatgtcgggaagacatacattccagtttgccaggacagtcctagtttacaccaagtgtcctctggaaactggtgtctagagtccttgctcctagtatctgtgtggaaaggtaaattgtgttgggtagcaggtgggatcctctctgatcatgctgagttgggattgttgcaccatttagagccactttcttgatagggaatggaatcccactccaaagcagtcatgagcgaatgagtcaaactgttattccatagaggaaggataaaaaaaaaatttataatcctttgaatgttagaacacttttatgatgcttaaagtatatgctgatgaactcagtaatgctacctggagcaaaatcgcaagccttttttttactgtggattatgtgttaaagtactcaagtaacatgttacttattatctggtgattgctaagacttaagtcatatatttgagaatgacataaagttgtgctctttgatggcagtctgatgattagtaaaccttccatagtttttgggaaagcactggagatttgcctgttgctctgctgtggtcagactggacgctcactggcttgcgcttgagaatctgggtcccacttttttttttttttttttttttagactgagtctcgctctgtcaccaggatggagtgcagtggtgcgatctcggctcgctgcaaccttcacctcctgggttcaagcgattctcctgcctcagcctcccgagtagctgggtttacaggcgcgcgccaccatgcccagctaatttttgtatttttagtagagacggggtttcaccatattggccagaatgttctctatctcttgaccttgtaatccaccaccttggcctcccaaagtgctgggattacaggtatgagccaccacgcccggctgagaatctgggtcctactttaatgaggtgtctatttttcaaaggtcaagaagctgaaagtgaggctttctagttctgtactttcagtttctgtagagtctctgtagtagcaactgaacttagccgttgtcccacagaagcagccatagacaataaataagtaaataaatgagcacggctgtgacccagtaaaactttttatttacaaaaaaaggtggcagtcagatttggcccgtgggccatagtgtgcaacccctgttatgtgtggagcttgaatcttttaaggactacatagattcaagttgttttctcctttattcttttacaccaagattatccaaaatagtatttctgacacttttgtgtttccctctctttctgttctatagaggaactatctggaacttatattctgttccaaggatagctgaacctgtatggcttactatgatgtccggcactttggaaaaaaaccagctctgccagcgctttctcaaggagtttacacttctgatagaacagataaataaaaaccagtaagcttcaactctctggagacttgtatgcaaatctcatggccaatgtgtgtactgcataggatgtgcctctttctgtattgactaagttggttgtatctttttccatttctccaaggttttttgctgccttactgactgcggtgttaacctaccacctggcctgggtcccaactgtcatgcctgtggatcaccctcccatcaaagccttctcagagaaacgtacctcccagtcagtgaacatgctggccaaaacacatccgtataatcctctttgggcacagctgggttagtacctaatttgactattcagagaatatatgggatggaataggaaaaaaatgctagaatttgtagtttataccggctctctcacccagtaattcataggttgtctttgggcagatgaggaataggaagttggtccctggattctaattgtagacccacgaccttcctctcttttttcccctactggcagctttgtgctacactcttaaagcagtataagccaactgtgttctcccattccacagtggctgttcaccctagagcaggatttcttaacctcagcactgttgaccaggtaattctttgttggttgagttgttgtggggtgtgggaagagctctcttacgcattaatggatattgagtggcatccttggcctccatttactagatgccagtagaactgcccctcccacctcccgccccaagttgtaacaatcaaaaatatccacagaaaagcacctcatcctggaaagcagcatgctataataacaataatgaaagctgacactgtgagccaagccctggttttacacatagtcattagattctcatccctacccttattactctcagcctcattttgtaacaatacagatgttgtcttgtccttgtgctcttggtcgtgagatgtataaatgaatacaagctccctcatggttagggggtaaaaggcgtgttctaaatcaattaaagaatttgtggatatttaaatggaattaaggaaggggagatatggagagaggctagttaacaaatataaaattacaactggataggaggaataaagtctagtgttctttagcactggattacgatagttaagaatagcttattttcagagaaagctagaagagaggtttcaaatgttcccaacacaaagaaatgataaaagtttggggtgatggatatgctaattgccctgatttgatcattactcagaacatgcctaactcattcttggtcatacgggaagtttttcctggggaagacagaacatggttgttttgttatggaataataatagtcttgaaaaaaacttagtctcattaagtggagaaggaaagggggctggatattaaggaaacattgtattccatgctgctggatcacccattttaaaacaatgctaattaagtagtgtgcatttagttagataaatgtattcataattaggtgtgcttcttatttgaaacataactgagagccattaattccctatgttcagcataataacgaagagttttttcctgtgggttcacaatcctcatctttcaggggagatcatgtattgttgaaagtcttcagtcctcccttcccccaaacaatccatcaggggtctggctattgacaagaggagtgtgaggaggggacgaggacgaggccctggtcggcgaaggcctgtgatagctttgtaaagccaagtgtaagtgatggccgagtttccattattacaaagaagtcgggggccttcaataatttgacaggtagaagcacttgctttgcattttattgttttcattcagtatttagcaagtcacagtaaacatgaaaatagaaactgctgggaatacacaatgatggagataaaatttcaatccaggttcctaagtatagagaagactatctggaatcattccaaagactcctctgagagctttccaggacaggtgccactgtgcgttccccctccatggctgctcagcactaccagggaagagggagggaagccggatgccactttcacgggtttgctgctcaggagctcggtgatccttgcttctgcccagccacttccctgtgtacaatgtgatcgccacccattagtgggctgcagaagcaatttagtgggtttaattaaaaagcatttaattggtataatagaatagaaaatatcagtgatttacatgtatattttgtaaaatgtctgttccaaaagatgcattgaggttgcagtataaaatgtatttctttcttggcataggtatacaaagtttaaatgccactgtctacaccactgactgaagtagttccatataggtctctttttgacctaatgatcttaagggtttgtagaaatgaaaaggagcttttctacccaaaagagatttggaccactgatttaatataagttaaaatgtgtgaaatttttttctcagaagtttacattgtatttttcaaaacacagtggaattagactacaaatcaatttttttttagttctcactttctcagaaatcaaaccatgtatttttgttgttgttgttgtttttgagacagagtctcgctctgtcacccaggctggagttcagtggtacaatcaaggttcaccacagccccaaccacccaggctcaagtgatccttccacctcagcctccctggtggctgggactacagatgtgcgtcaccatgcccagctaatttttgtaaaggcagagttttgccatgttttgcaggctggtcgctggtcttgaactgggctcaagcgatccaactgcctctgcctcccaaaatgctgggattacaggtgtcagccaccatacccagctgacaaccacatttaaataacccacaagccaaacaaattgcacaaaagaaattagaaaacatttgaaataatgataataaagatgcaataagttaaactgtgtagggtataaggagacactgttgaaaggggaattctacaacatagacgttattagaatgtgatcaggaataagtgtgcctttaagatactaaactctcttctcgtctccttatttttgttctctctcagcttctcctggtttatttttgtttctgtctatatagtcccctacctctctaaccccctttctttcaccatgcttcctttacagggcttctaaattctctcagcttctccacctcattctttcctctcctctttctagtttccaacttttcactattgttcccctcaacagttctttcctttcttctccctcttcctccctctttgttttctttttctctacatgttttaccctcctggctgttatctcctctccttctccatcctcttttggcttcaccccagttctctatcattttgcacctctctaacatcccatcttttttctttctgctttcccttctctctattcttccctctttcttcctaagtttcttctgtctgttcctctgctctctccgtctctccctccctgagtctccactctgtgtccccatttgccaccattcctttctgtgtcctcctttcctgtgacctcttctcctactttgtccagcacctttcctgcttccatgcactctgtctttggcctatttcacttggaagcacgcttgactccttcactttttcttctgctttttccccatttgcctctcttttaaatttttatttttaattgaggtaaaaagcatataacaacatttattatcttaaccatttctaagtgtacagttcagtcatgttaagtacattcacattgttgtgcaatttctacattttaaaaaattatattcatgaaaacaaatctattctaaaaattagcttcaattatccaagactcaaaaaaaaattgaacttccagtaaatatttaatattatgggtctactgttttaaaaatgctttattttatgaagtttggctataatgtaatagcactggttccactcacattgcactcattattttatatagtttaaatgattataaattgtatttttaataaccttccttgttttaccatttccatttgttccttagttattaaaatatacaatactcaaatgcattgctaaaaaataatattctaagtggtctttcccctgtagtttgttataccagattttggataagtaatgcttcttctttattaatattgaaactgatttaacaaaaaatatttcatgaattcctgaaatgactgttgatatcctgcggcaataggcagatgtaatcaaagtgttaacagtaatgagctcttagaaaggttttctcaaacaaaagtcctagcttcagcctacaattctgagttactctcttgaattctaggctgatttctcagtcacttgcaaacgcctctcagttaaagctctatcagcctataatctagtcattttatagagaggattgtttattattatttatgtcttgccatttgaatgttcttaggaaccgtacacaagggaatactcgcagaaggaggtatttcttaatgggtcccagggggaggtactttccgatggttctcataacttttttcccatactcatctattttaattagttttatctagtatatgcccttataactgctttccctcctctctagatgcattcctcagagggtttctaacttcctacattctgatttgtactgattaccatgtatcagttctcctttatttagtatcttttcagcttttgatttgttccaatattctggttattctttttttttttttttgagacagagtcttgctctgtcacccaggctggagtgcggtggcgtgatctcggctcactgcaacctctgcctcccgggctcaagcgattctcctgcctcagcctcccgagtagctaggttacaggtgtctgccaccacgcctggctaatttttgtattttgggtagagacggggtttcaccctgttggccaggctggtctcgaactcctgacctcaagtgatccgcccacctcggcctcccaaagtgctggaattacaggtgtgagccaccgtgcccagccctctgattattctttaatgggtttctaactccagtttgattatacaaagatacaatgagacacatctttttttatgagatggagttttgctcttgtagcccaggctggagtgcggtggcgacaccttggctctctgcaatgtctgcctcccgggttcaagttattctcctgcctcagccttcctagtagctgggattacaggtgtctgccaccacacctggctaattttttgtatttttggcagagacagggtttcagcatgttggccaggctggtctcaaactcctgacctcaggtcatccacctgcctcagcctcccaaagggctgggattacaggcatgagccaccgcacccagctgagatacatctttagggtcttaacacagtgcctgtccagttagtaaacataggttctttattataattgtccatcttcttatcaaatgtgtaacttattataaaatgtaataatcaaattatcaaatgcagtagttttaatagttaggcactgaagtacttttgatgaaaagcttattgctgggtggttggatgacacatttgcccttattgtctcctccttaagctgactgtagagctcacagtacattagtcagtttttaatcaacttgtcaggatatataactaatgggacatacttttttccagttgaattttcttttctgtttttttctgagacagagtctcatgctgttgcccaggctggagtgcagtggtgccatctcagctcactgcaacctctggcttccaggttcaagcaattctcctgccttgacctctcaagtagctgggactacaggtgcacaccagcacgctcgcctaatttttgtattttgggtagagacggggttttgccatgttggccaggctgctctcaaactcttgacctaaggtgattgcctgcctcagcctcccaaagtgctgatattacaggcataagccactgcgcctggcccagttgaattttcaagcgaaatgaaataaaaccttcagactcattcatgactaagtgattttcttcttgttaatcaagctgattctacttggtgtgtgtatgcgtattaagataattctgtgtagaccacctcattaagtattttgaattaattcactgcacttctgttgagaaattcctaaatttggattttatcccaaggcccaatgtcctgggattcttccaacaaattcttattattctagtttccaagatatagtattagatctggtcacatattcagagctctggctttagccttctttgggccatctcattggctgacccactgagctgcagggaagacccagcaggcaatgggaggggctgtgggcacagcagcacgactcccacacaccaggggtggtgggccacagcctgtgtccagactgactcacttacagtggcaaaactaaaacgtggtccttactagagagtagaaatcatgagtctgaagcagggactccagattgggaatataagttatctgttttgctcttgtaaagacggatatatctgtgacatgctaaccccagagaccactgcctttgtgtccacctttgctctctaggtgatctttacggagccataggctctccagtgagactgactcgcaccgtagtggtagggaagcagaaggacttagtccagcgaatactttatgtcctgacctactttctccgttgctctgagctacaagagaaccagctgacctggagtggcaatcatggtgaaggtgaccaagttttaaatgggagcaagatcataacagccttggagaaaggagaggtggaggagtctgagtatgtggtcattacggtgaggaacgagcccgctcttgtaccccccatcctaccaccaacagcagcagagagacacaacccctggccgacagggtttcctgagtgcccagagggcactgacagtagagacctgggtcttaaacctgacaaagaagctaacaggaggccagagcagggttctgaggcttgcagcgcagggtgcctggggccagcatcagacgcttcctggaaacctcagaatgcattttgtggggatgagaaaaataaagaggcaccgcaagatggctcttcaagacttcccagctgtgaagttttgggggcaggaatgaagatggaccagcaagctgtctgtgagctgttgaaagtggagatgcctacaagactgccagaccggtcagtggcctggccttgccctgacagacatctccgggagaaaccttccttagaaaaggtcactttccagattggaagctttgcatctccagagtctgactttgaaagccgcatgaaaaaaatggaggaacgggtgaaggcctgtggcccctccttggaggccagtgaggctgctgatgtggctcaggacccgcaggtttctaggagcccttttaaacctggctttcaggagaatgtttgctgtcctcagaatcggctttcagagggggatgaaggcgagtctgacaagggttttgcagaggacagaggcagcagaaacgacatggcagcagatattgctgggcagctcagccacgctgctgacttgggcacagcctcccacggtgcaggaggaacgggagggaggaggctggaggccactagaggtttgtatgtgaaggctgcggaaggacctgtgctggagcctgttgcccccaggtgtgtccagcggggccctggcctcgtggctggtgcgaatatcccctgtggggatgacaacaagaaggccaacttcaggactgaaggagacattccccgaaatgaaagctcagatagcgccctgggagacagtgacgacgaagcctgcgcttcagccatgctagatctgggtcacggtggtgacaggactggagggtccttggaagtggagctgcctctgccaaggtaactccagcaggctgggaagtagagggaactgggttcaaatcccactttcctggcctgacacctgtgatgttgttagccactactattgtctgctttacacacagtatctttttttccacaaagtactagaagtattattaattctatacaaacggtttcccacctgtccttcttccaaggatggtcactggcttagcaccactgagctcactgggacaggtggccagtggttgtctttgcagctatcgtgatcctttggggaagcctaagggatgtggtggagatgggggagggaatagggagtttaattttctgtcaactgcagagaaggtccgtggctggcagcagatgccttgcttcagaggtggtggattacactcgccgtgtggcctctctcctgccgatcagagcagcgtgaggtggttgggaaacaacacctctttcttaacactccatcaggttgattatttggtctgtaatgactgaaagcagtaattagaaatttcttctgttcttccgcactgtcgtgggcaccactctgtgcagatatgtcagattcctaaagccaggcttttggcaagagcccttcctgaaacattttctttggtcagtattttgacacagactgcctggtggatgtccaatatgaggtacaaaaacaaactcataactagccatggatagtttttttttcttccagccttccactttaaaaaactcccttttctcccacctgtgatccacttacttgagggttggtgacatggaccaccctgaatctattttatttacctgtatcattggagtgcttgtaccaattataatgaaagaaaaaagtacatttttagctgtgcattttaatgggccacatgttgttttaggtctcagagcatcagcacccagaatgtaaggaactttggccgctcacttctggcgggctactgccccacatacatgcctgatcttgtgcttcatgggaccggcagtgatgagaagctgaagcagtgcctggtggccgaccttgtccacacagtccatgtaagtgatcccagtgtggagcctctggctgctgacagtgtgtcagtcaaggtcttggctgacaacaggtgtttagactgaagagagactagttaaggggttgtttatggagatgtgggcagggttatgggaaccagctagggctagtgaggcacctggggcctagcagcagctggaagctagaaagcacacctgggcctgacagagtaaggggagggtgcgtgacatcagagccctggagaacctaagccaggacgaggggcggcctggctgcaggagcagtgaggagggggtgacttcctgccatccctcctcccattctctggtctctttctggtgcctctcattggctgagcccggctgaaagccagagagcaggggcacagctgatgcagacacacagccttgtggtgcatagaggtcagcctcctggggcccagaacagaacacagaagggcaaggagctgctctgggggtggtgggttagcagataggctgggcaaatggaataaacagcacagatggtgacaattatatgccgtcacggtgaggaccgaagaggtgtcacatgtggtttgttttttatctgatgcttaaacaagttcctaaaagtaatttattttaactgatttgtcattaagttcactttgatggctgcatgaggatgactgtataaagattaataagtctcactgaaaaaattgcctcgtggctgctattaagtgcttttctgctatctgcagggcaacaggaactaagcagttaaggaaactgtcaatctgatgggcctgtttttaactgagctgttattgggcagatgtgcaaaaatagacattttgtattagaaacattttgtatcttgtgcaatagggaaagtcctcatcgcattaagaaaatcagaatttggcctgttacctacctccttggccaacaagtatttttttttttgaggtggaacaaaaggcattgcatgttatctttggccttgagcatctcctctgtgaagaccaaacatcaggcacaggctaaacaggctaagtatatttatgtgaagtgggaaaaaaactcagtagtgaagcagatgtcaacataacctccctcaatggggagggctaagagatgaggatagggccatcagaagctggggaaagccagcccagtgtacacgtgtgtggccaaacgttcctaaccccacccctgctttgtggtcacatgccacccctcaccaggatactcctgggatgaaactatgaagttgcttttgtccctataatatcataattatttaatatcataatttctctttatagttatgaacaccatatagtcatttatcatttcatgagtccatgcatcaatgacccctgtaagaaaaatgccctcattgtataatgctaagttgtccaaaacgatgtctgatgctttggcaatttcacaggctgtatttatgtgtgtttagtaactgcctataacattaaggcaccttttctgtccgctcctattgtttatattcacacatgccaaactgtgagttgtttttttttttctgctctgctatcattttgatttctaacaatattggtgttggttattggaccttccttccatgaagcccagtgagctgcttctgacagaggtaccaagagactacaggggaactaatgggattgtcctcagtgacatcagttttaccagctggggactttgtttgaatgccctggatttactcactgaccactctggaaatgcaatctattgattgataaccctccttgaacttatctgtaaaaccattcatgaaatattttatgtttccataggctggcaagttctcatttttgtgtgttagattttcatggtgaccctctggctctataattcttttatttgaaaaaacacaaccatgtttactctgtcattactcttcaagctttttcgtatttcattttcccttccttttagaaggagtgttttcacactgtagcttttctcatttctttatgcaatcaccctgagagatcgaaagttattaagcataataacctatattgtgtcaaattgtgggtacatccaaagtgcagccatgcgtgggtgttaataggaaattccaaagggttcataaaaatatcttcagaagtttaatacattcagaatatatccaattagcattagtggatttctaatttcacttgacacattcatcataatgaattttgcttttgaagtagtgttctgtttaaactggcgctctggtctatggtagtgtttttttttttttttttaaaaaacaggcttactttcaacatccatttacaaacatttgttgaaaaatattttaggagtatttgtttaaacattattccgaatttactgctccataaagcctagtgaatatttaaattcttgaatatgttgccagaaaaagaagcagagatccaaaaacaagtatatgaccagagttagagctgaaataatagcttgttgaagaagagaaaattgtaataaattgctttatcaaacttgctttcaaaacctgttttttaagttgggcacagtggctcacgcctgtaatcccagcactttgagaggccaaggtgggtagatcacgtgagctcaggagttcaagaccagcttgggcaacatagcaagacttcatctcaaaaataaaatagcgttaaaaaaaaaaaaagaaaaaacaaacctattttttgaacattaatttcagtgctcatgctagatttcagcaggctttggtactcataattctttttagagaaggatttttaactgtttaaaagcaattgattccagttattgatctcttttctagacctgtgcacaatttggatttaataatctgtcttatgtaaattaaatgtggtggttttttttgttttgttttgtttttgtttttgtttttgttttttttgaggtgggatcttcctgtattgcccaggctggacttgaactgggctcatgtgatcctgcctcattctcccaagtagacaggattataggcacaggccactgtacctggctctaaatgtacacttttataactgctagtttggagtttttctctcattgagagattgctttgtaatgcttccaatgttaagaatttttttgtacttttcttatcctagtctcttatgaaagaaagatatagtaactacttcatcaattttcatttttattactgactttcacatatcaagattcagaagttctttaaatatttaaacacgtattcttgtttagtccatatactacctcttttctgtcatttgaactctctctgcctcctaatatataggttatacagctgccttaaattagtgtaaagtaatacggtttcagtttttttcttgccacatcttgtgcattctttcctctgttttccttttgactttaaatggaaagagagcaggcgtatgcgccagcagcattctatgcctgtgactcctgagtagccttttccctctcctttttcctcttgtgtctggcctgtgaatacagctgactgtatacagggttactgttggggttattgtggggcagtgtaaggtgatgaagatctcactgacttagtgttgatggcttgagtttgagtcctggtattaccactcgtttgttgataatcttaggtaaataaactggcattgctaagccccagaaaaatgtatttagtggaacagatgaaatatgattcagtggttaggaagttaacttctgaagacagacaaacctaagtttgaatcatggttcaccccttagtggctttgtggccttgggcaagtttctttaattttcttatctatactgtgaacagtacttacatcataggtttggtctgaagattctgtgagataatgcatatcaagtggttagcactttgccaggcacattgttaagtgcccaataaatgtgggccaaatgtgatagctcacccctgtaatgccagagctttgggaggatcctttgagatcaccctgggcaatatagcaaaatcccatctctagcaaaaaaaaaaaaatagctaggcatggtggcacatgcctgtagtcccagctactcaggagactgaggcagaaggcttgcttaagccaaatgttcaatgcttcagtgagctgtgatcattgccactgcactccagcctgggtaacagagcaagacctcatctcagtaaataataataataatatatgtaaaagtgctttgtaaatgatacagcaatatatcatgtttttaatatgggagagcagaatgacaaccattattttcgtaaaaatgaaaattactgtcagagataagaaagctatatatgggccaggcacggtggctcatgcctgtgatcccagcactttgggaggccgaggtgggctgattgcctgagctcaggagtttgcgaccagcctggggaacacagtgaaaccccgtctctactaaaatacaaaaaaaaaaaaaagttgccaggtgtggcagcgggtgcctgtagtcccagctacttgggaggctgaggcaggagaattgcttgaactcgggaggcagagaggttgcagtgcgctgagatcatgccactgcactccagcctgagcaatagagcgagactgtctcaaaaaaaaaaaaaaagaaaagaaagagaaaagaaagctatatgcgtatgtacttaaagttctcctaactagtcaatggccttgtcaatcccaggggactactgttgggaatgattgaacagaacctgtacacacattcattgagtgctaaaagcattcacttttgctttgcccaggagcagactggacagctctaactctgcagggcagggtcatcaagaccaaaattaacactacgttttgatgttttttaaaaaacaactatgctccagggcttcaagcattttacagaataatttataagatgaagtaaccattggatacagcagcctcttccatttaattttaagcgtagcaacagattgactccagaaatatcatgcaggaatcagtagcacagataaagagctttgctaaaagcctggctgtgatatatatatatatatatatatatatgctcatgaatacctaattagtccatgcagtgcaatcaacctgtaggactataaaagaacagcaagtcccttcaaatggtaaatcattacttaagtaacacagataacattaaatacctcaggtcagcaacaaccttaaaatcaataggatacaaagaaaacatctatgtaggacaaatccactattttggaacatctctcgttgttttcttttccccatgtttggataataaacatggcagtgcctcaggcctctagcactgtcttctatagccacagccctcaatacaacactacctatgtccactggcctatggagcacttttaaaactacatattttgacctataaatgggttttgattaccagtttttttaatgatatagaactaaaatcatcacacattaggcttcttattgattagtgaaacctttgtattatgtgtgtgtgtatttatacacatgtgcacacatgtcacacttgtatgcatatggcatgtcatgccaggttatgtcatataagcatgtatgccaggtcatgatgttaaaatgtatttcttatcatggattgtggttaaaaaaaatactgatctctgggtatccccaactccaatctgaaatcattgtgattctctcgccttctcaatgtgactagtctttttaaagttccttttgatcttcccaaatggcatccctgtgtccactttacccacttccaccgccttgtgcagtgctgcaagaggactttctaaagcatgagacaatcatttactcttttgcttgaatagcttcctattttctaagagactaaactgtaaactccatagctggaattgccccttttatgtccttcaaatatacacacatacccctgtatctcctcttatgccccagtaacactgtttgccattctttaaatagtccacctttcctcacacctctctgcctatcagattatgctttctttgcctaggacactattgaacaaacttttttacatttttgaagacccatttcatatgttgcctcttcttcaaaatcattccaggccccatatccctgttctgttccagatgtgttcctctactagggcttcaggtgccttgaagcagaaagcagggactttattttccttatattcccagcaccttgcctggtgcctggcacatagaaagtgctcactaacgttagttgactcttccccataaaactggggttagagtcatgtgtgtctattactttagtgtggccctttcttctgaagtaaagagagatgggagatgatctttctttaaagaaacttaaaggggaagagtaagatgtttagacatgcctgcagctctgtgtgttcattgtcgttacctaaaggaaaataaaagcttattataggtctcttgggcttcatgtctcttgcatcgtgtcagagttagacacatgtctaattttgatgtttttcccaaaatgttttactacctacaagatatttgaacatctgtgccattctctgcaaaaaagctaccaaccctctctcattttattttggagttccatatctcatcatgtaacttgattctgataccctttctgaccttgagcacctcttctcaacttccgactgaattttactcagcaagtggccagcctgaaagtgcagccattccagaagttatgtacggtatcttcaaggccacggattgaatttgggccctaatcaggtgagcacaggcacagatacacagaagatcagacattttcccggaacccctccagaccatcttgccacactttgaaccctttcttctttccctctacccctaagtcttcatactgtcttcatgtatacctacaaggatcccttagcaatgtcccaaggtccaaaatgattaattttcctcttcctcttgtttaccttagtacaactcttaagcctttagtgactgacattaaacctgtttccaagagaaaaatttctgataagcaaatgcttttagagttatgataaggccatatgtgattgttaccccttctggtattttcatgtgttaaaaatatgtttgatgcactagaaatctccagtggtggcacttcaggtggtcgagataactcgtgtcacctgatggggcagagatgcttttgggttagagtggggagagtcacacctgagagatttatcagttgaaaaatacttatcaggtatcttttatgtgcttggtactgtgtttatagcagtagtcaaaatctgaagtagaattagcaggggcgtgatggctgtgtgcccagggtcccagctactcaggaggctgaggtgggagaatgatttgagctctggaggtcgaagctgcagtaagctatgatggagccactgcactccagcctgggtgaaagagtgagaccccgtctcctcccccaccccccctcacccaccgaccagccaaaaaaaagatctgaggtaggaggattccagcaacatgtactaaactggtgtggatggcatgcctcccctctaaaactatatagtgatggataaaatatcaccatcctcactgctgccccattgttataattcctgtcatgaaaaaaaatggaaatccttttgtgccagagataaatggaaatctaaaccaaagcagtaagcatgagctggtcctccaggatttcagtcttgatacaggtcctaggaattgggtgctgagttctcagattcacccgaggatgaaagactgtggtcttgtgtgcatgtaaggcttgagacctggaatcaagccccttacctaaagtctggagcttcaaagaactattcttccatgaaaaggagactagaaatcaccagacataagcagtgaagcagcaaagaaacaggctggaaacaggttagggaaaataaagtcacccatgagaaatcaaaaccccctgtctgtgctatttgtgggtttcaggtccagatttattctacccgagtgatttgcgaatccctacccaagaaataaacataaaaccagaagcatagaaacctttaggactctggcagaaggaagcacactactttagacacttctacaaccacaagcttatgagacgcatataggaaaatgaaacatagctccagtaagataggcccacgttcagaaattacaaacatatgtgggaaaccaggaaatcatcatgagtggagggcaagcgcatacaagcaggagaatcagcactcctccagttggcaataactattaaagtagccatgtttaaagtgtttacggtgataaaaagaaggaattggaaccttaaaaaaaagagaggataatgtgataaatgatcatttagattcatgtaagaactaaaaacaacttctaaaattgaaaaatagtccctgaaattaaaactccaggtataggttaaagaacagagcagattaaatacagctaaagataattagaatttgaaatggaggctacttaagaaattatgtttttgagctctgagacaaaaagacatgaaaaatatcaaagagcaagtaaaagatgtggtggccagagtgaagagactttatagcatatgcagaaagagaatagagaaaatgagggaaagtaatattcaaagaaagaatggctggcatttttcaggttaagtaagcacactgactcccaagtagggagaatattaacaaattcacacttaacaactggacatcaaagataaagaaaactcttagaagtagctagagagaagaagacatggcatctgtcctcagggagtttgcgatctaacaggaaatagaaataagtcagcagtgaaaatagtgtggtcaagtgtgtggcagcaggaggccagggtgctgagaacgtgcgcacaaggcggctgtggtgaggactcagctagggtcagtagcagagtgaggatgagaagcagggaagagtgcagggcatagtatggctttttcagggaactgaagcccctttcgctgatgaccccttcagcatatctcagagctggctttgccaccaacaggaggtctgtctgtcccctctttcagtaaaactgctgtcaggaatgtctactcaacatgggatctaattaaagagcttctgcatggcaaaagaaactaccatcagagtgaacaggcaacctacagaatgggagaaaatttttgcaatctacccatctgacaaagggctaatatccaaatctacaaagaacttaaacagatttacaagaaaaaagctaacaaccccatcaaaaagtgggcaaaggatatgaacagacacttcacaaaagaagacatttatgcagccaacagacacatgaaaaaatgctcaccatcactggccatcagagaaatgcaaatcaaaactacagtgagataccatctcacaccagttagaatggcaataattaaaaagtcaggaaacaacaggtgctggagaggatgtggagaaataggaacacttttacactgttggtgggactgtaaactagttcaaccattgtggaagacagtgtggcgattcctcaaggatctagaactagaaataccatttgacccagccatcgcattactgggcatatacccaaaggattataaatcatgctgctataaagacacatgcacacgtatgtttattgtggcactattcacaatagcaaagacttggaaccaacccaaatgcccatcaataatagactggattaagaaaatgtggcacatatacactacggaatacaatgcagccataaaaaatgatgagttcatgtcctttgtagggacatggatgaagctggaaaccatcattctcagcaaactatcgcaaggacagaaaaccaaacaccgcatgctcactcataggtgggaattgaacaatgagaacacatggacacaggagggggagcatcacacactgggacctgtggtggagtggggggagtggggagggatagcattaggagatatacctaatgtaaatgacgagttaatgggtgcagcacaccgacatggcacatgtatacatatgtaacaaacctgcacgttgtgcacatgtaccttagaacttaaagtataataataataaaaaaaattctagctgactttatatattggaggagatggtttaagaataatgagtgataaccagatttcttttctctggatggatttgagactgaaggggttttttggtttgtttttatttttttaaaaactggtctacaattcacacacctctgcagtccttttagtggctctcagtcatcctagtggggtgtgttggccaaggacgaccttgtatggtctgaatcttcagttccaaggctatggaggatgcagttatataggtgggtcttctcctctgaggaggcagaggaataccaaaggggatctgaggacctttaagagtagtgctgagaaggtgactgtcatcacattcatcatgagctctttgcatgactgactaaaggcctttcttacagctacataaaagctaatattaagtcatggtgctgtaacataaggagaattattgtggaaaggtattttgtcatgtagcatcctcttattaaagtacagtttaataaatgtattaaacttaccagaattatataaaatgaataacaaatgggagttcaaatgaagccaaagactctccctctccctctccgtctccctccacggtctccctctccctctctttccacggtctccctctccctctctttccacggtctccctctccctctctttccacgttctccctctccctctctttccacggtctccctccctctctctttccaccgtctcgtctccctctccctctctttccacggtctccctctccctctctttccacggtctccctctccctctctctctctttccacggtctccctctccctctctttccacggtctccctctccctctctttccacggtctccctctccctctctttccacggtctccctctgatgctgagccgaagctggactgtactgctgccatctccgctcactgcaagctccctgcctgattctcctgcctcagcctgccaagtgcctgtgattgcaggcgcgtgccgccacgcctgactggttttcgtatttttttggtggagacggggtttcactgtgttggccgggctggtctccagctcctaaccgcgagtgatctgccagcctcggcctcccgaggtgctgggattgcagacggagtctcgttcactcagtgctcaatgttgcccaggctggagtgcagtggcgtgatctcggctcgctacaacctccacctcccagccgcctgccttggcctcccaaagtgccgagattgcagcctctgcctggccgccaccccgtctgggaagtgaggagcgtctctgcctggccgcccatcgtctgggatgtgaggagcccctctgcctggctgcccagtctgggaagtgaggagcgcctcttcccggccgccatccagtctaggaagtgaggagtgtctctgcccagtctctgcccggccgcccattgtctgagatgtggggagtgcctctgccccaccgcaaccctgtctgggaggtgaggagcgtctctgcctggccgccccgtctgagaaatgaggagcccctctgcccggcagccgccccatctgagaagtgaggagcccctccgcccagcagccgccccgtctgagaagtgaggagcccctccgcccggcagccgccccgtctgagaagtgaggagcccctccgcctggcagccaccccgtctgggaagtgaggagcgtctccgcccggcagctgccccatctgggagggaggtgaggggcagcccccgtccggccagccgccccgtccgggagggaggtggggggcgcctccgcccggccaccaccccgtccgggaggtggggggtgcctctgcctggccgccccttctggggagtgaggagcccctctgcctggccgccaccccgtctgggaggtgtacccaacagctcattgagaacgggccatgatgacgatggcggttttgtcgaatagaaaagggggaaatgcggagaaaagatagagaaatcagattgttgctgtggctgtgtagaaagaagtagatataggagactccattttgttctgtactaagaaaaattcttctgccttgggatgctgttgatctatgaccttacccccaaccgggtgctctctgaaacatgtgctgtgtccactcagggttaaatggattaagggcggtgcaagatgtgctttgttaaacagatgcttgaaggcagcatgctccttaagagtcatcaccactccctaatctcaagtacccagggacacaaatactgcggaaggccgcagggtcttctgcctaggaaaaccagagacctttgttcacttgtttatctgctgaccttccctccactattgtcctatgaccctgccaaatccccctctgtgagaaacacccaagaatgatcaattaaaaaaaaaaagcaaagaaaaatttatatattactcatttattaataaatcagaaactacaagaagctatcacccaaaaaaaataaaataaataaataaaatcaagctaacacacacaaaaaaaaaatgaagccaaagaatcatgtgttttattatccagaatatctcagagaaaaacatagagagaagtgcttccaattacctgaatcataagttgcctgttccctttgtgtgtgtgtgtgttttttgttttttttgtttttttgagacggagtctggctctgtcgtccaggctggagtgcagtggcgcagtctcggctcactgcaagctccgcctcctgggttcacgccattctcctgcctcagcctcccgagtagctgggactacaggcgcccgccactatgcccggctaattttttgtatttttagtagagacggggtttcaccgtgttagccaggatggtctcgatctcctgaccttgtgatccgcccacctcagcctcccaaaagcctgggattacaggcgtgagccatcgcgcccagcctccctttgtgttttaaagaggcttcccagtggcttatccctgatagttaaacccacactgttataactattgtgcagattttagatctggttatgaatacagaagtcttcacactcctgctctctgtaatacacatgtgggctgagacatctctgaagattgataaagggtcagtgtcaagcagcataaagatggggaacttgtagcaacatgcatgatagaagtggctgtgttttctcctaatgacaataaattcagaccatcattcacacttcttgcactcttgtcttctaagggatttccttggattttatagtagagggcttgggagactcattgggctaaaagtcggaaacacttgtgagttcctagactttatttcttacatgccaagatacttaataagctcttttttttttttttttttttgtcctgagtgttcctatctgtagagcagtactgtgttcctgccccccttcaggagaaatggcatgatgaattaataagtagttatgggaagcatatatgcaagaacggcatttcctcactcttcattgggttaaaaatagataatcacgtgaaatactagtcatttaaatgtggtacatagaaaagaaatatattaattatggtgcattggaggtataatattgccagaaaataagaaatgcacagattacttaataggaactgggttgcatccaaaaataaactgttcaccacagctagaatgtattagatattttgcacatgcccagcactgtgttatgttcctttcaaaggctgcagaagaaaaagaaatgtgatttatctccttgagttacttataaaatcactgagtagacaaacatgtgaaatcaagaacaagttaagacagtgtgtgatgaagtgccaaaatgaatggtgtggacagcaagtattctcagaggtcaaaggaagagcagtgcagtgcatgtgggaaggtttccagggcgagggatggactcacgccaggtccttgagggattgtggacttgagatggggtggcagggaaggcattctgggcacaacctgaggtaagagcaggaatctttttggcctggagaaggaggctgtactagtcccactttcacacaactgtaaagtactgcccaagactgggtaatttataaaggaaagaggtttaattgactcacagttctgcagggctggggaggcctcaggaaacttacaatcatggcggaaggtgaaggagaagcaagtaccttcttcacaaggcaacaggagagagagcaagcgtatgcgaggaagtaccacactttaaaaccgtcagctctcggccagccacagaggctcatgtctgtaatcccagcactttgggaggccgaggcaggcggatcacttgaggccaggagtttgcgaccagcctggccaacatggcaaaaccctacctctgctaaaaaaaaaaaaaaaaaaaatacaaaaattagctgggcatggtggtgtgtgcctgtagtcccagctactcgggaggctgaggcacgagaatcacttgagcctgggaagcagaggttgcagtgagccgagattgtgccactgcactccagcctgggcaacagagtgagattctgtctcaaaaaaaataaaaaaatcagctctcgtgagaactcactatcacgagaatagcatgggggaaattgccccatgatccaaactcctcctacctgtccccttcctcgacatgggattataattggagatgagatttgggtggggacacagagccaaaccatatcaggggtcttattgggaactgaatatgtacagattgggtgggcccaggctgtgaagagctgtaagtgtggaagaaagaacagttttaacttaatggtttgggtgatgtgtgctagcgtagattttagagttggtgaaggaaatgatcatgtggtattttaagaagtttgaggttttaggtaaagtacataaactagggcagtgttgtccacagttgcactatttgtgagctcctgagtctgaggtttcaggggacatggtcaatacagagagagggtggttcaggacagcaggacgaacatttgagcacctaatgtgttgggttctatgctacacgtttcaacacatttttctcacagaaaacttgtgctttaaatggcatttaagcctcacagaagctctgaactaagtactatcccattttacagacatagcaactgaggcccagattgagttgctgaggttccacagctggtaagtgacggtggttgtattcaagcccaatctgacttcagagcccttgctgtcatcttattgttgccctttgttgaattatcagaaccacagctcttgcgattctctaaaccttgtagacaatttcttgttcgtggaagtttaagttaagcagaagtcatgtgtatatgaatcaaggcagcatattttgtgtgtgcggcaatctgacctaaaaccttgaaattggaatgtcctaggcatttaacactcccaggaaatggacccatccttagaggctacaaattaaccaggctgatcctgttgattcaacaagctgtaatagcaaagaaaactcaataatcttctaaagatttataaaacaaggtatttcatttgttactctatcttgaaaaatcttcacaggaaagtagtttgggtaaacaagatattgacaaggtagaaatgaataaatgattgtttctaacttctcatatgagtgcagcaaggggaaaatgataatggcatatggcctctacctcctttctttctggagactggctgtccaccttaacaattgtctgcagctccttactcacctcccatgttcttctatccgcaagtccctgtcagaagtttccgagttacccaattaagtttctgtgggaggcatgtaacctgctgttagtggtctggagagggtggcaggaaggtgccgggctggcagctctgcattgataccctggctgccgttggacactcagtgtggtgtgggcactcaggagggtggcgatagggcagtgcttttctcagctgatggaggaagtacaaacatatcgcagatccattctaataggagaatttgataaattatttggacaggaaacgtatttcaaaattgattctccttagcttgagagaaaagagggtaattgatgtcagcatccataaggtttgtaaagtttctcaaacaggcatcttaagtggaatgactatatttaatattagtgtttctctcagattttcatttggaactctgaaatgaggacctgattaatctgagacaataatggtttgcaggagaacttttaaaaaaggtaactatacaacgtaggctttttggtttgtttttctagagatatttagtcaaggtaacaaaaccctttgggaaaaaagatgttagcattaagaagagaaattttaccaagtaatcttactaaactgacaggtatccatagcatatctcccttttccttaaggtgtatgggaggccaaagtgaggctcaccatggttcagttgtcagcgttggggtacaggcatgccccaccttcctattccttttctttagttcccatgcccaaactccaagtcctaagaagagcagatagtggattaggcttttcataggtgtttaaatcagtcaatcttaggttcgtattttttagaatacttaatttcttaaaagtattgctacatgtatgttactgcaaataagtgtatgtatgaaacctgctatgcatgtgaacttgataaaattgtgaacttaaaaaacttacttgacagatttcactatttactaacttctactattaaggtatggctagtaagaaatagtattataaagaagcatacatataattcagtgtttgtttattgtggttctatagatgcctaaaaaatagtcttcccagccaggcacggtggctcacgcctgtaatcccagcactttgggaggccgaggtgggtggatcacttgaggtcaagaattcgagaccagcctggccaacatggtgaaaccccgtctctactaaaaatacaaaaaattagctgggtgtggtggtgggtgcctgtaatcccagctacccggagggtgaggcaggagaattgcttgagctcaggaggcggaggttgtagagagccgagaatgcactactgcactccagcctgggtgacaaagtgagactctgtctcaaaaaaaaaaaaaaaaaaaaacccaagaggaatgttaaattgaattccagggcatagtgtgcaggtatgtatttctgtgacaaatccaaacatagttttctagatcttagagttctttaaattctgaaaacttagagattgactgataagccagatcataatatgtttacactgcccagtctctaatggggttgagtttcctttggaaagatgatcagaaatctccagtcaccagaactttagcttcaactctctgaccctgtgcaagttcaggcctgatcagggatggccagcagtggccccggtggcccttgaattgtaactaaaagtagttgatgatatttttatctctttccagcattcatttcttttcttgaatatttagacttccctctagtttgttcttcctttaaaaggtgtttattctttagtaaataagtaagtagctactaagtgatatagttagatggaggcaattggattgattcagggaattgtgtgttatgtatttagtagcctgagaatatgtaattcttggagttttttctcttttgaaaaggttctgctggttcttttctgttcctggggcctgcatgcataaaagtcagcaatccatgctgtaaggaacacaagatgctcatcgactcttgtcatttgcttgtgcttaatctgtctcattttcattcagcaagtaacatttttcaaatgccagctcctgtgctagaggctaaggatgcagagagaagattcagccccactttcaaggaatggactcccgcaaattcttgtcagtttgtctcaatctgtgtactcattgttctttcgtctttactcaggtctctacctcagattctgcctctttgctccagtgatttaaaaatgacttgtgagcctataatcccaacattttcagaggtcaaggcaggcagatcacttgaggccaggagttagagacaagcctggccaacacagcaaaaccctgtctctaacaaaagtacaaaaattaggtgggtgtgatggtgcacacctgtattccagctacccaggagacatgagaatcgcttgaacgcaggagccatgtgttgcagtgagccgagattgcaccacatcactcctgggcaacagaacaagactgtctcaaaaaaaaaaaaaaaaagtaagaaactttggaggccaaatgtagtggctcacacctataatcccagttctttgggaggcagaggtgggaggagcacttggggccaggagtttgagaccagcctgggcaacatagcaagaccccatctctacaaaaacgttttttttaattagccaggtgtggtggcacatgtctgtagtccagctacttgggaggctgaggcaggaggatcacttgagctcaggagcttgaggttactatgaactgtgatcagacttctgcactccagcctgggcaaaagcaagaccctgtctctaaaaaataaataaatacaaagacttgtgctgatttttcatgttagtattttttagttttacatttctcttgcatgcttacttttaaaataattgagccaacctctctgtccctttttgttattgcatgtaaatctacagccttctgatataacctaagcttgcagaatcttccatccatcaccttcctagtatgcctcttggcccttattccagcagttagttgcttaaaacaaagcactttgtgttggtagtggtactatataacttatagtctatgcactgttggggattgacacactcttcccttccctaccactgcagtgggaagatcatttagaagactaagttcgatttgaacctagggtccaaattacctattgcaaatcaatcctcctcctccccttgccctttgcaaaagctagaattcactgtgaaaggtgacaggcatacgttcaactcattgtctctatgttgacatatggtcagtatgagagaaaggtctctaatatagatctgtcccgtggcatgaccagcatgttgtggatttctgacaaatgcaaagcagtgaaggagtttgagctcaaaatacaaatatttgaagtgttcaaatttccttttttttttttttccataaggaccagactcattgatggcaagtcgtcatcatcttgatataaatttataacacaggatgaacaagaccttggaggagcttgtaaagagaagtcactgaagccttgtatctttagttgtccgttttggagactgtatatatgcatgtgtaagaagcgtaggggtgaaagggtcatgaaaacctttggttgaaaatggtgatggggtcattatgtgtgtaagaaaatctttgtacttttcagttaacaattctacaaaatgagaactgtcttgggaaactgggctttatgaattcaaaaatatactttatcaaattctttatctctcatgtttaaaattatttgaacagacaaataaatgttgaacatcagactttgcctgattgctgttcctttcaatgggaaaaatataaatcctgataatagggtttatatctttttaaacccttatatttttataaaccctgataatagggaaaaatataaaccctattaccagggtttttcctactatttttcctactattcccccttggataatagtaggaaaaaatgttggtccgcacgaagttttcattcatctcaccactctctttcccatttgtgagaaggaatacaaagctgcacaggacagagtccaagactagggagtcagatcacctgttaaaattacagtattgcatcatgcatctttgatttgtatttgcagccttcccactacttggattaagtcgtaaaaattacaggtaaccatggtccagtggcaaagctgtatatctctttgggttctttgttgcaattagcaactcttgttaacttaaacaggagggactttagtgaaggaatattaggaatgtatagaattgatgagaagtcaaaagaattagggttcaaataggcaacaaggcaattctggagttccaggaaccatggactacttgaaggtgtttgtactaagtcccaccaggccttgtactaattgctgtctgggcaggaatatgctggtgccaaccatttttggtcttctgtgctggtactaacaaggaattcccagggaaggagcatccagctggcatagcttgggccatacaaacacactgtgatagaggaaggatggacccgattgcagtctcaccgggccttgtctaagaaagatcattcttcaaaggaaaattcggatggatttattggaggaagttatttaagcagccaaaagaatcaagcagtcaccccaggatagtagaaaggagtaaggacggaagcagccagtactaattttccttggtaaatgagggttagaagaatgtgcatatgtgcattggctttgaggcaggtctctctgtctctggctctctctatcctccccctcccccacccatccctcccaagcagttacactttgatttgttttgagaaattaggtctttaaaaaagtccttgtgactgcttcagtgtttaccctatttaccctatggcataatttaccagttgttaaatctgctctatccataactgcctggctgtcaagaattttacatttaaatgtatttatcagtagtgaaactttgaccttttggactcacctggataaataaacccatccctttgtgtttctttttcagcatccagtcctggatgagccaatagctgaagctgtctgtattatcgcagacacggataaatggagtgtgcaggtagctacaagtcagaggaaagtgacggacaacatgaaactaggccaggatgtcctggtctctagtcaggtgtccagtttgcttcagtccattttacagctctataagcttcacctccctgctgattttgtaagtactggttcttatatcaccaaagaaatctagttttaaaatgcttttaacgacattttgattataaaatcacaaattcaaaagtactgttttaatataattggagattagcataactaaaactagaacatgcagcataaaactcgcaacaggatagatttcagtagtaatagctcttccgtgaaacaaataacaaggagcggcactggaattttttggaatgaggtatatggtgcagtaaataaggaatgggtggagagatcaagcataaaaggaaactgtaaatcatccactggagaactcatgagttctccttttattagattgatattttaataagtaggccagtttctgaagggattgtagttccttttattaagcaaacattttcacaaaggtgttaaggataaaatagaatatcatttgtgtaaacatttccaacatttccagctttaaagtactatacacatgtaagattatatcaattgttgctttttttttttttttttttttgacagagtctcactctggagtgagtagtgcagtggcatgatctctgctcactgcaacctccgcctcctgggctcaagtgatcctcccacctcagcctcttgagtagttggactagaggcatgtgccaccatgccagctaatttttgtattttttgtagagatgggttttgccatgttgctcagtctggtctcgagttcctgggctcaagcaatccgcttctttccaaatgggattttaaaatcactttcgtaacaatactttaaatacaaacaacagacagagcctatacactcttagaaaagtatcagtagctccccccagccactggaattaacatgcatgacaaaatcttctcagtatctgcgtatgtgcagagaaattgaaagaaagagaaaatacatttagagagggagggggaaaggtttcaaaagaagaaaagcttttccagtggtgatgaacacttaaaaagagagagagaagcttaagggcatatggcatatagctgggtagagcttggatgggctgacctcagagacaggtgtgtgaggaaagagtctgctttctctgctgttccctcctgtctgcacagcgctgttctctgcagcacagccccaaaccaaaacatctgttatctgcttcctggcctccaaaaatgatgcaaacctgtttacccaacaaagcaggaagtttttaaatattaattacctacgctaattgctaatgtaatggtcattgtcctgggtttttatgaccaaatctatacttgtacccattcctcaaaaagagtctagacttttatgactttgaagaaggtgctctgaaataccgtctggttgttatcaaagtcgggacagtgtggcaaggcaggaagaccactgagcgtagctgggttatggtctaggctttgccgttggttagttgtgtaacaatggacaatcccgagtctctccgaacctcagctttcttagttgtaaaagaaagatagtacctgttcaacaagggtgctgtgagaatcttctgaaaattagggatataactgctttttactgctaaagcaccatgccaatattataaaatactttaaaagccatatatgttagctttagagccccataacctggggtcaaatccaagttctgctacttcctaaccatgtactctttcaaagccttaatttccttatctgcaaagctggggaaataatagaacctatctcctatggttatgaaattatattagagaatgaatgtaaagcacttggaatagtgttagatgttataagcactcagtaaacagctactattagtatgatagtcaataacaattagtttcatgaaacaatattaatggttgcaaagactgacaacaccttttttccaaactgtttatttgggctttaagctgaagcgtactcttgcaagacatctgtcctggggcaatatgagaagcacttgtggattattatgatcttattttttgttatacagtagtaggcagtttctccttctaaaagcaggttgagttatgctgatttagaggttaatgtttccttttctgtaagagaagtaatgtatattagacttcatagtttacttcataagtatttgccaaacttttatatttcattctataatacatacgtcttgtcacagttgatatcttggttatcaaagcaataaattgttatagttaattctttttacttcctttggacagaagtgtgttcaagcacttactagtgtgaatgacttatttaacctgacaaaaccaagatcaaagaaaattttatctgcagtttaaaattctccttaaaaaaaatcacttgaatgaaacctgtgattaaatggcttttagaaccttcaatacaaaaagagaaggtagctatttgaaattttagaagttaaaaattggagaaatccatctcaggaataaaatcccagaaagaggagtttaaaaagcccccagcatggttcaatggaataatcaagtcttttaaaaaatgttttcttttttttttttttttttgagacagagtttcattttgtcacccaggttatagtgcagtagtatgatgttggctcactgcagccttgacctcctaggctcaagcaatcctcccacctcagcctcctgattagctaggactacaggtgtgtgggccactatgcccaggtaattttttaatttttgtagagacagaggctcactatgttgcctaggttggtcttgaactcctgggctcaagtgatcctcctacctcagcctcccaaagtgctaggattacatgcgtgagccactatgactggctaaaagttgtctaaatgctttgatttcacgtctagtatatatttcatatagaccacagttcttatttccacactgcatcatacagttttcatataggctgtgaacactgtaattactttttccaaacagaaagggttcaatgtaatatgaatattatttttaatattttgtgactcttactaaaaattttctatttcactccataaggaactgaaagctaataaagatccttttaccaccttgtttacttggaggagcatttccatgagaattggtgaaatcctccttactttattactcttagtcacttagcagttgtgtttcatccacctgacacaatgtatttaagattttaaaccaatgaaaaactgaaaagattgcatctctgatagatattttttccatgtcgttgatcagcccagatggtcaagatcaacattttcaaatgcatctgttaatctttttaccttgaaaataacaggcctaatggtctagaagaaaattaggtatgatggaattacccttgccaaagccatcaggtgtcttactgaagatgctcgggtatctgcctgccaaatgcaaaagcatttgcctctggtgaaagacacagatggttgctattctctaaaaaaatgaagctgaacactattccaagggtaaagatgtcctgaaaataattgccttttctttattgttattaaagacctagttaaaatacattcttgaaagcaaaagaaaaaaaagttgtgggggaggttcaaaatgacctgttcccgtcagtctcctctggaaatgtactgggccagaataatctgagctattgggggaaaaaaacaaaaaccatactgtttactaaattatttataacaaaaatgcaatttgctatgtggttacgtgtaaattcacattctcaatattgtttagctataaaaattatatcaagaagttcttaatatgggaaaggattattataaagttttttaaaggcaagaaacacttttggaatgatttcaactatgaaaaaaatacttgtttaaaaagactagaataatacatatgtaaatcttaatagttagcaaaagtaaactttgttttacaagaacctattcttatacctggtagtggtagggtttgagatggcttgtgattttttaagtgtatttgaaactgatgagataaaagctgtgtagttagaaatgaattaagaaaattctgactcttaaaatattggcagagatttgacttctagccctcattgtgaatgttcttggctttgcagtgcatcatgcatcttgaagatagactacaggagatgtaccttaaaagtaaaatgctatctgaatatctccggggacacacacgagtccatgtgaaagaattaggtgtcgtactggggtgagttctgtgaagtgccgtcacttgtccctttgataggtatccctagcattgtacccactaacgtgtttagcctgtgtcaccctaaacctcaggccctggtaacccatcaaagtatgtggagtccatcagatacgtgcctctgcaactccccaatgaacagcatgttccgttatctgatactgggtttcacacctacaatcaatcgcaggactttaggctggtcgtgctttgttgctcttctctgtggattatcttatgcttgaaaagaaaatttaatcccacactgcccgtttctagtaactgaataagatgctgaagtcacaagctgtgggacatgcagcagcagcttgtgtttacatttcacttcctggaggaggagtaggttggcacattccacctggtggcaggaaaggcccttctaggcttgaggagcctgcctgcgtgtctgtggggggacagtgctttccttcctttattataagcccaccaaagaggagacttgtatgttactaaaaatgcctatcatcctccagagggtatttgctataacttctctaggggaagtaattcttacttctgttttactgtcagcttgatttttcaaaagagaacaaaaagacattgtacatttggggaactgcccccgcttatccatgatgatgattcccctcacttgggagaagaaaatatttataatgtcgacgtttaaattatctaagcctcctaagagactggggcctttgtgttttgcttagatttctcatctttcacacccagaatgtgacgcctgtgttgttcggctcttggcatttcctgtcatagattattcttacatactttatttacaaagtatttcccccttatgaggtgtttgcttttgcagttaacttgcaacatgtctctttgtcgttttttttttttgcttttgtttatatctctctaccagcctcatacttcaatcctgccttattagttttttttttattattattatacttttaagttctgggatacatgtgcaaaacgtgcaggtctgttacataggtatacacgtgccatggtggtttgctgcacccatcaacccgtcatctacattaggtacttctcctaatgctatcccacccccagccccccacccgccaaataggccccggtgtgtgatgttccccttcctgtgtgtgttgtcattgttcaactcccacgtatgagggagcacatgcggtgtttggttttctgttcctgtgttagtttgatgagaatgatggtttccagcctcatccgtgtccctgcagaggacatgaactcatcctttttatggttgcatagtattccatggtgtatatgtgccacattttctttatccagtctatcattgatgggcatttcggttggttccaagtctttgctattgtgaatactgcttcagtaaacatacatgtgcgtgtgtctttatagtagaatgatttataatcctttgggtatatacccagtaatgggatggctgggtcagatggtatttctagttctagatccttgaggaatcgccacactgttttccacagtgattgaactaatttagactcccatcaacagtgtaaaagtgttcctatttctccacatcctctcaagcatttgttttttcctgactttttagtgattgccgttctaactggtgtgagatggtatctcattgtggttttgatttgcatttctctgatgaccagtgatgatgagctttttttcatatgtttgttggctgcataaatgtcttcttttgagaagtgtctgttcatatccttcacccactttttgatggggttgtttttttcttgtaaatttgtttaagttctttgtagattctggatattagccctttatcagatgggaagatggcaaaaattttctcccattctgtaagttgcctgctcactctgatgatagtttattttgctgtgaagaaactctttagtttaattagatcccatttgtcaattttggcttttgttaccattgcttttggtgttttagtcatgaagtctttgcccatgcctatgcctgaatggtattgcctaggttttcttctagggtttttatggttttaggtcttacatttaagtctttaatccatcttgagttaatttttgtaaaaggtgtaatgaagggttccagtttcagttttctgcatatggctagccagttttcccaacaccatttattaaatagggaatcctttccccactgcttgtttttgtcaggtttgtcaaagatcagatggttgtagatgtgtggtggtatttctgaggcctcagttctgttccattggtctgtatatctgttttggtaccaataccgtgctgttttggttaccgtagccttgttgtatagtttgaaggcaggtagcatgatgcctccagctttgttctttttgcttaggattgccttggctatgcaggctcttttttggttccatatgaaatttaaaatagttttttccagttctgtgaagaacatccatgggagcttgatggggatagcattgcatctataaattactttggggagtatggccattttcacaatattgattcttcctatccatgagcatggaatgttcttccatttatttgtgtcctctcttatttccttgagcagtggtttgcagttctccttgaagaggtccttcacatctcttgtaagttatattactaggtattttattctctttgtagcaattgtgaataggagttcacttgtgatttggctctctgtctgttattggtgtataggaacgcatgtgatttttgcacattgattttgtatcctgagactttgctgaagttgcttatcagcttaaggagattttgggctgaaatgttggggttttccaaatatacaatcatgtcatctgcaaacagagacaatttgacttcctctcttcctatttgaatacgctttatttctttctcttgcatgattgtcctggccagaacttccaatactatgttgaatagttgaataggagtggtgagagagagcatccttgtcttgtgctggtttccaaagggaattcttccagtttttgcccattcagtatgatattggctgtgggtttgtcagaaatagctcttattattttgggatacgttccctcaatacctagtttattgagagtttatagcttgaagtggtgttgagttttgtcgaaggccttttctgcatctattgagatgagataatcatctggtttttgtcactggttttgtttatgcgatggattacctttattgatttgtgtatgttgaaccagtcttgcatcccagggatgaagccagctggatcgtggtggataagctttttgatgtgctgctggattcagtttgccagtgttttattgaggatttttgcattgatgttcatcagggatattggcctgacattttctttttttgttgggtctctgccaggttttgctttcaggatgatgctggcctggcctcataaaatgagttaggcagaagtccctctttttctattgtttggaatagtttcagaaggaatggtaccagctcctgtacactctggtagaatttggctgtgaatccatctggtcctggacattttttggttggtaggctattaattactgcctcaatttcagaacttgttatcagtctattcagggatttgacttcttcctagtttagacttgggagggtgtatgtgcccaggaatttatccatttcttctagattttctagtttatttgagtagaggtgtttatagtattctctgatgttagtttgtatttctgtgggatcagtggtgatctcccctttatcattttttgttgcatctatttgaatattctcttctttcttctttattagtctggctagtggtctattttgttgatcttttcaaaaaaccagctcctggattcattgattttttgaagggttttttgtgtctctatctcgttcagttctgctctgatcttagttatttcttgtcttctgctagcttttgaatttgtttgctcttgcttctctagttcttttaattgtgatgttagggtgtcgattttagatctttcctgctttctcttgtgggcatttagtgctataaatttccctctaaacactgctttaaatgtgtcctaaagattcgggtacactgtgtcattgttctcattggtttcaaagaacttttatttctgccttcatttcgttatgtacccagtagtcattcaggagcaggttgtacagtttccatgtagttgtgtggttttgagtgagtttcttaatcctgagttctaatttgattgcactgtggtctgagagactgttatgatttccattcttttgcatttgccgaggagtgttttacttccaattttgtggtcaattttagaataagtgtgatgaggtgctgagaagaatgtacattctgttgatttggggtggagagttctgtagatgtctattaggtctgcttggtccagagctgagttcaagtcctgaataccctgttaattttctgtctcgttgatctaatattgacagtggggtgttaaagtctcccattattattgtgtgggagcctaagtctctttgtagctctttaagaacttgctttatgaatctgggtccttctgtattggttgcatgtagatttaggatagttagctcttctggttgcattgatccctttaccattatgtaatgcccttctttgtctctttgatctttgttggtttaaagtctgttttatcaggactaggactacaacccctactttttttcactttccatttgcttgtagatcttcctccatctctttattttgagtctgtgtatgtgtttgcacgtgagatgtgtctcctgaatacagcacaatcatgggtcttgactctttatccagtttgccagtctgtgtcttttaattggggcatttagcccgtatttgatttaaggttaatattgttatatgtgaatgtgatcctgtcattatgatgctagttggtttttttgcccgttagttgatgcagtttcttcatagtgttgatggtctttacaatttggtatgtttttgcagtggctggtaccgctttttcctttccatgtagtgcttccttcaggagctcttgtaaggcaggcctggtggtgacagaatctctcagcatttgcttgtctgtaaaggattttatttctcctttgcttgtgaagcttagtttggctggatatgaaattctgggttgaaattttttttttttttttttttttgagacagagtcttgctctgttgcccaggctggagtgcagtggcgtgatcttagctcactgcaacctccgcccctccaggtttaagcaattctctgcctcagcgtccagagtagctgggattacaggcgtgtgccacgaaaattcttttaagaatgttgaatattggcccccactctcttctggcttgtagggtttctgcagagatctgctgttagtctgatgggcttccctttgtgggtaacctgacctctctctggctgcccttaacatttttttccttcatttcaacctccgtgaatctgaccattatgtgtcttggggttgctcttctcgaggagtatctttgtggtgttctctgtatttcctgaatttgaatgttggcctgccttgctaggttggggacattctcctggataataacctgaagtgtgttttccaacttggttccattctccctgtcactttcaggtataccaatcaaacgtagatttggtcttttcacatagtctcatatttcttggaggctttgttcgtttgttttcattttttctgtaatcttgtcttcacgctttatttcattaagttgatcttcaatctctgatagcctttcttctgcttgattgatccagctattgatacttgtgtatgcttcatgaagttctcgtgctgtgtttttcagctccatcaggtcatttatgttcttctctaagctagttattctagttagcaattcacctaaccttttttcaaggttcttagcttccttgcattgggttagaacatgcttctttagctcagaggagtttgttattacccaccttctgaagcctacttctgtcaattcatcaaactcaattctccatccagttttgttcccttgctggtgaggagctgtgatcctttggaggagagagcattctggttttttgaattttcagcctttttgcccaggtttctccccatcttcatggatttatctacctttggtcttttacgttggtgaccttcggatggggtctctgagtggacgtcctttttgttgatgttgatgtggctgttttctgcttgttaattttccttctaacaggcctgtctgctgcaggtctgctgtggtttgttggaggtccactacagaccctgtttgcctgggtatcaccagcggaggctgtagaacagcaaagattgctgcctgttccttcctctggaagcttcgtcccagaggggcacccaccagattccagccagagctctcctgtatgaggttctgtcggcccctactgggaggtgtctcccagtcaggatacacaggggtcagggatccacttgaggaggcagtctgacccttagcagagctcaaacgctgtgtgggggatccactgctgtcttcagagttatcaggcagggatgtttaagtctgctgaagctgtgcctacagccgccccttcccccaggtgctctgtcccaaagagatgggggttttatctataaacccctaactggggctgctgcctttttttcagagatgccctgcccagagaggaggaatctagagaggcagtctggccccagtggccttgctgagagctgcagtgggctccgcccagtttgaacttccaggcagctttgtttacactgtgaggctaaaccgcttactcaagtctcagcaatggtggatgcccctcccccaaccaacctcaaacgtcccaggtcgacctcagactgctgtgctggcagtgagaatttcaagccagtggatcttagcttgctggctctgtgggcatgggacccactgagccagaccactcggctccctggcttcagccccctttccaggggagtgaaccgttctgtctcgctagcattccgggtgccactgaggtatggaaaaaaaactcttgcagctagctcagtgtctgcccaaatggccgcccagttttgtgcttgaaacccagggccctgattgtgtacacaccaaagggaatctcctggtctgtgggtcatgaagaccatgggaaaagtgcagtatccagactgcagtgcagatattgagttcctcacggcttcccttgggtaggggaaacaattccctgaacccttgcacttcccgagtaaggcaacaccccaccctccttctacttgccctctgtgggctgcacccagtgtccagccactcccaatgagatgagccgggtacatcagttggaaatacagaaatcacccaccttctgcgtcgatcttgctgggagctgcagaccagagctgttcctattcggccgtcttgccttattagattttccattgccaaatgtgtgccttacatttcaagggctttaccccatccttgacccttacaggtgtgcatcaacacgtgtaatcataagcttttattcccctttgcactcatctctaggtcctcttagtgcattattagtggactcatgttcatccttcctttatccccttcctcccgtagtcagggccagtagcactaaaagtactagagaacttctgtgcactctgaaatcagatctgtatgtagcattactggagaaggactagaaaaccccatgaggtaatgccagatactgttttatttttactttgaggaattcaagggtaaggattaggacatagtccacaaactgaaacagttcaatttttttttttcatgacacctggcatcatttttagccagtgcccatactgtatccacctctgctgtaagagaggcagccaaagctgtgtccatttgaaaccatgatgtctcttaacccagtaccttttagtgtcactttgctctcagaatcttgtggcttaaatgctcagtgaggatcccagtataaactttgaacaaattcccaatgttttttaagaaattgctaccatcatcgtttttctaagaccaatttgaacttaggtgaaaaatcagtatgcatttagaagtgttgactggaagaatgagtttataatggagaataccttaaagtatgatacaatgaagttatatagggaatacaggaaagttagaaagtctggtgacccctgccaagggaaaaagagctttatgtccacacacaggcacaacacacttcctgtatttctctccctttgcctccctggtcagtgtccactggaatattttattaaaagagtaagtttattatccttccatctgttttgctttttcattagttttaaatgataatctatcaaacttagtacctagaaataatactttctcataaaaagaaataatactttctcataaaaccatgctcttttaaagtaatattcttttcttttctcaatattcaggattgaatccaacgacctgcctctgttgactgctattgccagtactcattctccttatgtggctcaaatactcttataagctaaagctcaggacagttcttccttggaagaaaaaaatcaaattctcaactgaaggagaaaggaataagctctctgtgatgtcaaaagcatgagaagagcaaacagaaacagtcattccacctttttgttttgtgtttttgctgtcaagctgatgcttcattgaagacttaggtttacttgacataatagcatttgtgattgtcgtgaacactttaggccatttgttacccatgaatcaacaaagaaactgacctttttggtaggaggaaacataagcactaaacactaagctgttgcaacagattgccttgtgctgtttgggcagaataaagacaagtgacttgagcggggtggtcagcagtgtacataatattccagtaggaaactgcttccaagtttaagcatgagctccccaaactggagaaaacatattttgctattctgagacaacaatcagaatacagactttggattccaggtcacagtttgctttttagacaaggtaaagcaaagaaagccacattgtgccatcttcagctccagtggctttagcagtgactgtttgacataaaacatgtaagaattgcttgttgggaagagtgctttagggacccactgttttcatttcttcttggagtttaccttgtttcagatgcagccatgggtaggtcagagatggattgttggtgcaataaacccaagaatcaatgtagcctcttaatcccatcaagatgtagtttgtagcagcaaagtgtacagtctgaaaccgtatgttttatccttatattttagagctttcagcagcctttttaagagaggccacttaccaaagttatttctataagctcaagagtgtttcggttggtaagttcttccagctgaagccactttttccttatagttaatacaaatgactatttttactttaaaaggcacagctgtcctggtgggaaatgaaacctgcagcagttcaggatgactaatgaaagcaattagcttgaacatttagaaaaaattcatatatgatctaaatttttatattatcatttctgtgccttctaattcctgcatccttttcaaaacatctttccagacattaacttacacattgtataaaaccgaccaaaatgatttcctaaagttcatgcaaaaaaaaaaaaaaaacaacctaattttctgttaatataaaagaaacttcagtttactgaccgtgaaacagactatgtactgacatccagggtaaagtaaaagacttttaaatattggtcattaaaggacaggagctaagctagcaaagcaaaacatctttagcactttgcagatctcaagcagttaaccaggctctgattcccttccactgttttatgaattaattccagttcttttcatgtatctttgaacctaagattatgaagtaatttccctattagggactagaatgacttcagttttttcatttgataaaaatcagaactgctacctttcccttttttaatgatgcaaaatgtagatgagtgcattaagttttgtaagatctttatcattttatgtcattcattgaaaattgaaatgttcattctttttaatgttttcctatttccttttgcctagcatttgactttggtgttttaagttctgtagttccatgacatcattgtttgctgttgtgttacagagagagaaggaacctcacctgtggctcagctcaccccacatccgtttctcattacgtgtaaataaactgtcagagctgatgttacagcttttacagtttaaagcattcccctcgtctctagttccttttttcttgtttacatgttttgggcactttccctcattcaccaccttccagggtttcatagaaaataacttgttacaaaatcagttcaattctaatgtggacatagtggcatgttcataattagacccatataggggacactgagctttaaatcgttgattctaaactctatacattaaaaaaattcagcccaggcccctcaaagcctgagaaaatttaatttgctcttaatttaatgttccaaaactcactcttggaaaaatgcctgttggaaaactacaggtgggtcacatgtgggggctgtctccgtgacactcaggattccagtcagaacctaatcctcatatctattgcctacaaaaatagaccaagaatgttgctgctcttttataatcctttaaatatttaacattcaagttttctttgtcttaaattcagcctcttcctaaaagcaaaaaagaaaaaaaaaacctcacagaattgtgttgagatccaccgctcacacgccgtacaccacccagtggcttcattctggcttagccgcagaggcaagaaagggaccccacttgctcccatgcccacctcaagaaaaaacataaaacaattttttttaaaaaagaaaagaaatctacctcagttgacaggattccacctttagggtttcttcaacttttaagtcttacctgttgagtgtaacttttgtagcatcttgcttttccaagcaagctagtgaggcatgacagagcagaagtctgtaaatgtccctgtgatggacctctttctagcatgttgcagttttatttttaataaattggtaagtgaaatgaatgtaaaggtaattgtgtacgttttagacatgacaatgaaaatttaaaatgtagcttccatacttgtgcataattccaaagtattttattttttatcaatcagtgttaaatagctttttgtacaggcttcaatccatttttcgaagtgtgctgttttttaatgaaagtaactataatcttttcacatcccatggaactgccgtttacacattgcaactttttaaacttaaccatatttttcaaaattaacgtttttggagggagaaaaatccccgcttgctaaatgatactaaaccgttgtttgggctcttataattaggtcctgagattttataaaaatttagtctgtagctttttaggttcttcactagagttggttgtacataaaaataataaagaatataaagtatcccaaaattcttttaaagtctggatttttccgctaatatgtactttagagaatattttgttcatgcatacttccacgttaaattgaaaatgtcttcagcttctcttggtaaatgtgaaccatttgttttttattgtgcttgggggagagggtattttaatataatttttgcctaaatcaagaagtcccctctgaatgttaatttttaaatgtcaaaatatgatgaacgatatatcttgaaagtgagattgcaatatgcttaaacttaagtggtatttcaaaaacgagaaaattctggaatttgtcatttgaagctccataagagaaattgataggacttcgtttttgatcagtctgaatagataccaatgtcattgtgtgggaattttttttaacttgtttatgtattattttgatccatttttctgtggcatttggtgcaataaaacttttgaatttatcttgaacattttcctggtgctgcatgcgatttgttatatttaataaaatgtagaggtctcatttctaataattcgtgctgaaaacaagctgattatttatctcagtggtttttaaccggggtgttttggaaatgcagggacatttttggttagcataatgccaggttagggttactggcacagagaggctgggggctcagatgataggcgagaggtcctgcaccatgtgagacagccccatgggatgaggacttgtcccacccacctcctgcgtaacccttaaatgtcctgctggacatttatatggctaaaaaagcctgtttataattaagcagataattctgctatacataaaaaacacaatgtatttttacatgatttttgtatataatgcattctccaggaatgcaattgttgtataaattgagggaagatttttactttgtaagatttagaattttagcaagaagtggtcacttggtctttaccaagaattgatatacttttggaaaactgcgtttccaatggtaacatagtttggtagctatggtacccatggaatttgagtcaccaatacaggacatctctgtcagtcttcatttgtagcccctgcattcatgaagactctgtatatagatgcctacttcattatattttttgagatggggttttgctcttattgcccaagctggagtgcaatggtgcaatctcggctcactgcaacctccgcctcctgggttcaagtgattctcctgcctcagcctcccaagtagctggggttacaggcatgcgccaccacaactggccaattttttgtatttttagtagaaacgaggtttcaccatgttagccaggctagtcttgaactcctgacctcaggagatctgcccacctcagcctcccaaagtgctgggattacaggcgtgagccactgtgcctggccaacttcattatattttctaatctactgccccaatatttatgtattaaagtagtattataaattacttttaaatttcttttaaattacagtataatagggcattatattggtatgatataaattgagtatatttgtaaattttattttaggttaataaagggggcattacaaaatatttgctctgaaaagggatgatgtccacagatatatttgttctcaggaaaaaatatgccactgagagcaactgttggtaccaacataatgccatactgagttatgttatcttaaagactggggggaaagttacagtagatatttcaaaatcctttctgataaatgaaaatttcaagtgtttttccctgaagctttttttttttccttttcgtgcatgttcagctctccaaggatggcttccctgctgtgtactcgggtgaaacagctttaaaatcatgccattgataaaaggagttaaacgcacgtgcacacaagagtgctttttggttccctagtgcctggaccgttctgtcagacgctttctgtatgttacctcatttaatcctcacaatggatgaggggtactgtgatggtttttttttttttttttaagagacagggtctcactttgtcaccaggatggagtacagtggcatgatcatagctcgcagtaacctcaaacttctggcctcaagtatcctcctgcctcagcctctcaagtaccagggactacaggcatgcaccaacacacccagctaatttttttaaaaaaaatttggggctggacgcaatggctcacgcctgtaatcccaacactttgggaggctgaggcgggcagatcacgaggtcaggagatcgagaccatcctggctaacacggtgaaaccctgcctctactaaaaatacaaaacattagccggccgtggtggcacgcgcctgtagtcccagctactcaggaggctgaggcaggaaaattgtttgaacctgggaggcagaggttgcagtgagctgagattgtgc

SEQ ID NO: 2 - DNA, 7038 bp, Homo sapiens
  source 1..7038: mol_type = genomic DNA
agtcatatgaccggcagccggcggctccggcgccgagcagagttactcagtcgcagcggccccgcgctcccgcaaggctgggcggccgcgccgccgcgatggccccgccaccgcggccgccgcccccggctgcgcgctgagccgccggccccccgagcgccacggccggagctgcggcggcggcatcatggccccgaccctgctccagaagctcttcaacaaaaggggcagcagcggcagctccgcggcggcgtctgcccagggcagggctcctaaggaaggacccgcctttagttggtcatgttcggagtttgacctgaatgagattcgcctgatagtttaccaggactgtgacaggagaggcagacaagtcttgtttgactctaaagctgttcaaaagattgaggaggtgacagctcagaaaacagaggatgttcctattaaaatatcagccaagtgctgccagggaagcagcagtgtcagcagcagtagcagcagcagcatctcttcccacagttcttctgggggatcttcacatcatgctaaggaacagcttccaaagtaccagtacacaagaccagcttccgatgtcaacatgttaggggaaatgatgtttggctcagttgccatgagttacaaaggctccaccttaaagatacactacatacgttctcctccacaactgatgattagtaaagtcttctctgctagaatgggcagcttctgtggaagtacaaataacttgcaagacagctttgagtacatcaaccaagatcctaatttgggaaaactgaacacaaatcaaaatagtttgggtccttgtcgtactggaagtaacctagcacacagcacaccagttgatatgccaagcagaggacagaatgaagacagggacagtggcattgctcgatcagcctcactaagcagtcttttgatcacacctttcccatctccaagctcctctacatcttcttccagcagttaccagcgccgctggcttcgaagtcagacaacaagtttggaaaatggcatcatcccaagaaggtcaactgatgagacattcagcttggctgaagaaacctgtagctctaatccagctatggttaggaggaagaaaattgccataagcatcatcttttccctatgtgagaaagaagaagcacaaaggaatttccaggacttcttcttttctcattttcccctgtttgaatctcacatgaacaggctgaagagtgcaattgaaaaggctatgatctcctgtaggaaaatagcagaatcaagtctccgagtccagttttatgtcagccgtttgatggaagctctgggagaattcagaggaactatctggaacttatattctgttccaaggatagctgaacctgtatggcttactatgatgtccggcactttggaaaaaaaccagctctgccagcgctttctcaaggagtttacacttctgatagaacagataaataaaaaccagttttttgctgccttactgactgcggtgttaacctaccacctggcctgggtcccaactgtcatgcctgtggatcaccctcccatcaaagccttctcagagaaacgtacctcccagtcagtgaacatgctggccaaaacacatccgtataatcctctttgggcacagctgggtgatctttacggagccataggctctccagtgagactgactcgcaccgtagtggtagggaagcagaaggacttagtccagcgaatactttatgtcctgacctactttctccgttgctctgagctacaagagaaccagctgacctggagtggcaatcatggtgaaggtgaccaagttttaaatgggagcaagatcataacagccttggagaaaggagaggtggaggagtctgagtatgtggtcattacggtgaggaacgagcccgctcttgtaccccccatcctaccaccaacagcagcagagagacacaacccctggccgacagggtttcctgagtgcccagagggcactgacagtagagacctgggtcttaaacctgacaaagaagctaacaggaggccagagcagggttctgaggcttgcagcgcagggtgcctggggccagcatcagacgcttcctggaaacctcagaatgcattttgtggggatgagaaaaataaagaggcaccgcaagatggctcttcaagacttcccagctgtgaagttttgggggcaggaatgaagatggaccagcaagctgtctgtgagctgttgaaagtggagatgcctacaagactgccagaccggtcagtggcctggccttgccctgacagacatctccgggagaaaccttccttagaaaaggtcactttccagattggaagctttgcatctccagagtctgactttgaaagccgcatgaaaaaaatggaggaacgggtgaaggcctgtggcccctccttggaggccagtgaggctgctgatgtggctcaggacccgcaggtttctaggagcccttttaaacctggctttcaggagaatgtttgctgtcctcagaatcggctttcagagggggatgaaggcgagtctgacaagggttttgcagaggacagaggcagcagaaacgacatggcagcagatattgctgggcagctcagccacgctgctgacttgggcacagcctcccacggtgcaggaggaacgggagggaggaggctggaggccactagaggtttgtatgtgaaggctgcggaaggacctgtgctggagcctgttgcccccaggtgtgtccagcggggccctggcctcgtggctggtgcgaatatcccctgtggggatgacaacaagaaggccaacttcaggactgaaggagacattccccgaaatgaaagctcagatagcgccctgggagacagtgacgacgaagcctgcgcttcagccatgctagatctgggtcacggtggtgacaggactggagggtccttggaagtggagctgcctctgccaaggtctcagagcatcagcacccagaatgtaaggaactttggccgctcacttctggcgggctactgccccacatacatgcctgatcttgtgcttcatgggaccggcagtgatgagaagctgaagcagtgcctggtggccgaccttgtccacacagtccatcatccagtcctggatgagccaatagctgaagctgtctgtattatcgcagacacggataaatggagtgtgcaggtagctacaagtcagaggaaagtgacggacaacatgaaactaggccaggatgtcctggtctctagtcaggtgtccagtttgcttcagtccattttacagctctataagcttcacctccctgctgatttttgcatcatgcatcttgaagatagactacaggagatgtaccttaaaagtaaaatgctatctgaatatctccggggacacacacgagtccatgtgaaagaattaggtgtcgtactggggattgaatccaacgacctgcctctgttgactgctattgccagtactcattctccttatgtggctcaaatactcttataagctaaagctcaggacagttcttccttggaagaaaaaaatcaaattctcaactgaaggagaaaggaataagctctctgtgatgtcaaaagcatgagaagagcaaacagaaacagtcattccacctttttgttttgtgtttttgctgtcaagctgatgcttcattgaagacttaggtttacttgacataatagcatttgtgattgtcgtgaacactttaggccatttgttacccatgaatcaacaaagaaactgacctttttggtaggaggaaacataagcactaaacactaagctgttgcaacagattgccttgtgctgtttgggcagaataaagacaagtgacttgagcggggtggtcagcagtgtacataatattccagtaggaaactgcttccaagtttaagcatgagctccccaaactggagaaaacatattttgctattctgagacaacaatcagaatacagactttggattccaggtcacagtttgctttttagacaaggtaaagcaaagaaagccacattgtgccatcttcagctccagtggctttagcagtgactgtttgacataaaacatgtaagaattgcttgttgggaagagtgctttagggacccactgttttcatttcttcttggagtttaccttgtttcagatgcagccatgggtaggtcagagatggattgttggtgcaataaacccaagaatcaatgtagcctcttaatcccatcaagatgtagtttgtagcagcaaagtgtacagtctgaaaccgtatgttttatccttatattttagagctttcagcagcctttttaagagaggccacttaccaaagttatttctataagctcaagagtgtttcggttggtaagttcttccagctgaagccactttttccttatagttaatacaaatgactatttttactttaaaaggcacagctgtcctggtgggaaatgaaacctgcagcagttcaggatgactaatgaaagcaattagcttgaacatttagaaaaaattcatatatgatctaaatttttatattatcatttctgtgccttctaattcctgcatccttttcaaaacatctttccagacattaacttacacattgtataaaaccgaccaaaatgatttcctaaagttcatgcaaaaaaaaaaaaaaaacaacctaattttctgttaatataaaagaaacttcagtttactgaccgtgaaacagactatgtactgacatccagggtaaagtaaaagacttttaaatattggtcattaaaggacaggagctaagctagcaaagcaaaacatctttagcactttgcagatctcaagcagttaaccaggctctgattcccttccactgttttatgaattaattccagttcttttcatgtatctttgaacctaagattatgaagtaatttccctattagggactagaatgacttcagttttttcatttgataaaaatcagaactgctacctttcccttttttaatgatgcaaaatgtagatgagtgcattaagttttgtaagatctttatcattttatgtcattcattgaaaattgaaatgttcattctttttaatgttttcctatttccttttgcctagcatttgactttggtgttttaagttctgtagttccatgacatcattgtttgctgttgtgttacagagagagaaggaacctcacctgtggctcagctcaccccacatccgtttctcattacgtgtaaataaactgtcagagctgatgttacagcttttacagtttaaagcattcccctcgtctctagttccttttttcttgtttacatgttttgggcactttccctcattcaccaccttccagggtttcatagaaaataacttgttacaaaatcagttcaattctaatgtggacatagtggcatgttcataattagacccatataggggacactgagctttaaatcgttgattctaaactctatacattaaaaaaattcagcccaggcccctcaaagcctgagaaaatttaatttgctcttaatttaatgttccaaaactcactcttggaaaaatgcctgttggaaaactacaggtgggtcacatgtgggggctgtctccgtgacactcaggattccagtcagaacctaatcctcatatctattgcctacaaaaatagaccaagaatgttgctgctcttttataatcctttaaatatttaacattcaagttttctttgtcttaaattcagcctcttcctaaaagcaaaaaagaaaaaaaaaacctcacagaattgtgttgagatccaccgctcacacgccgtacaccacccagtggcttcattctggcttagccgcagaggcaagaaagggaccccacttgctcccatgcccacctcaagaaaaaacataaaacaattttttttaaaaaagaaaagaaatctacctcagttgacaggattccacctttagggtttcttcaacttttaagtcttacctgttgagtgtaacttttgtagcatcttgcttttccaagcaagctagtgaggcatgacagagcagaagtctgtaaatgtccctgtgatggacctctttctagcatgttgcagttttatttttaataaattggtaagtgaaatgaatgtaaaggtaattgtgtacgttttagacatgacaatgaaaatttaaaatgtagcttccatacttgtgcataattccaaagtattttattttttatcaatcagtgttaaatagctttttgtacaggcttcaatccatttttcgaagtgtgctgttttttaatgaaagtaactataatcttttcacatcccatggaactgccgtttacacattgcaactttttaaacttaaccatatttttcaaaattaacgtttttggagggagaaaaatccccgcttgctaaatgatactaaaccgttgtttgggctcttataattaggtcctgagattttataaaaatttagtctgtagctttttaggttcttcactagagttggttgtacataaaaataataaagaatataaagtatcccaaaattcttttaaagtctggatttttccgctaatatgtactttagagaatattttgttcatgcatacttccacgttaaattgaaaatgtcttcagcttctcttggtaaatgtgaaccatttgttttttattgtgcttgggggagagggtattttaatataatttttgcctaaatcaagaagtcccctctgaatgttaatttttaaatgtcaaaatatgatgaacgatatatcttgaaagtgagattgcaatatgcttaaacttaagtggtatttcaaaaacgagaaaattctggaatttgtcatttgaagctccataagagaaattgataggacttcgtttttgatcagtctgaatagataccaatgtcattgtgtgggaattttttttaacttgtttatgtattattttgatccatttttctgtggcatttggtgcaataaaacttttgaatttatcttgaa

SEQ ID NO: 3 - DNA, 7329 bp, Homo sapiens
  source 1..7329: mol_type = genomic DNA
acagatggagtgagtcagtccaagctgctcaacctgttaaatgtcttttctttgctaactggagtataagcttaagaacaaaagtaggacttgtctatgtttgtaatgggattgcagacagcgtgttttgtaatgtgatagatggatctgacttcctaaattattggcaggcttaatttacgtaacaaatgaatgttccacctttttttttttttaaacctttgaaaggggaaattagtacactgctgtcaagtagcttttctcacatactgtatagggagtgaaatgattgtttagaactgctggtcattacagaatgttcctcacataacaaaggaacttcaggatttgtctccaagtccatgtttatggtcaggataaaccagaagaacattaaaccgttcaggagatgtgcggcggcacagcgaacaccacaaaccagccagagagctggcaagactctgccagatgtgtgagtgatgctgttcctggtgctgggaggatttacagggcgcttttatgcacaaagattaaaaaacacaccggagtagacaggagcactgaccacacggaactcgacaacagttggtcatgttcggagtttgacctgaatgagattcgcctgatagtttaccaggactgtgacaggagaggcagacaagtcttgtttgactctaaagctgttcaaaagattgaggaggtgacagctcagaaaacagaggatgttcctattaaaatatcagccaagtgctgccagggaagcagcagtgtcagcagcagtagcagcagcagcatctcttcccacagttcttctgggggatcttcacatcatgctaaggaacagcttccaaagtaccagtacacaagaccagcttccgatgtcaacatgttaggggaaatgatgtttggctcagttgccatgagttacaaaggctccaccttaaagatacactacatacgttctcctccacaactgatgattagtaaagtcttctctgctagaatgggcagcttctgtggaagtacaaataacttgcaagacagctttgagtacatcaaccaagatcctaatttgggaaaactgaacacaaatcaaaatagtttgggtccttgtcgtactggaagtaacctagcacacagcacaccagttgatatgccaagcagaggacagaatgaagacagggacagtggcattgctcgatcagcctcactaagcagtcttttgatcacacctttcccatctccaagctcctctacatcttcttccagcagttaccagcgccgctggcttcgaagtcagacaacaagtttggaaaatggcatcatcccaagaaggtcaactgatgagacattcagcttggctgaagaaacctgtagctctaatccagctatggttaggaggaagaaaattgccataagcatcatcttttccctatgtgagaaagaagaagcacaaaggaatttccaggacttcttcttttctcattttcccctgtttgaatctcacatgaacaggctgaagagtgcaattgaaaaggctatgatctcctgtaggaaaatagcagaatcaagtctccgagtccagttttatgtcagccgtttgatggaagctctgggagaattcagaggaactatctggaacttatattctgttccaaggatagctgaacctgtatggcttactatgatgtccggcactttggaaaaaaaccagctctgccagcgctttctcaaggagtttacacttctgatagaacagataaataaaaaccagttttttgctgccttactgactgcggtgttaacctaccacctggcctgggtcccaactgtcatgcctgtggatcaccctcccatcaaagccttctcagagaaacgtacctcccagtcagtgaacatgctggccaaaacacatccgtataatcctctttgggcacagctgggtgatctttacggagccataggctctccagtgagactgactcgcaccgtagtggtagggaagcagaaggacttagtccagcgaatactttatgtcctgacctactttctccgttgctctgagctacaagagaaccagctgacctggagtggcaatcatggtgaaggtgaccaagttttaaatgggagcaagatcataacagccttggagaaaggagaggtggaggagtctgagtatgtggtcattacggtgaggaacgagcccgctcttgtaccccccatcctaccaccaacagcagcagagagacacaacccctggccgacagggtttcctgagtgcccagagggcactgacagtagagacctgggtcttaaacctgacaaagaagctaacaggaggccagagcagggttctgaggcttgcagcgcagggtgcctggggccagcatcagacgcttcctggaaacctcagaatgcattttgtggggatgagaaaaataaagaggcaccgcaagatggctcttcaagacttcccagctgtgaagttttgggggcaggaatgaagatggaccagcaagctgtctgtgagctgttgaaagtggagatgcctacaagactgccagaccggtcagtggcctggccttgccctgacagacatctccgggagaaaccttccttagaaaaggtcactttccagattggaagctttgcatctccagagtctgactttgaaagccgcatgaaaaaaatggaggaacgggtgaaggcctgtggcccctccttggaggccagtgaggctgctgatgtggctcaggacccgcaggtttctaggagcccttttaaacctggctttcaggagaatgtttgctgtcctcagaatcggctttcagagggggatgaaggcgagtctgacaagggttttgcagaggacagaggcagcagaaacgacatggcagcagatattgctgggcagctcagccacgctgctgacttgggcacagcctcccacggtgcaggaggaacgggagggaggaggctggaggccactagaggtttgtatgtgaaggctgcggaaggacctgtgctggagcctgttgcccccaggtgtgtccagcggggccctggcctcgtggctggtgcgaatatcccctgtggggatgacaacaagaaggccaacttcaggactgaaggagacattccccgaaatgaaagctcagatagcgccctgggagacagtgacgacgaagcctgcgcttcagccatgctagatctgggtcacggtggtgacaggactggagggtccttggaagtggagctgcctctgccaaggtctcagagcatcagcacccagaatgtaaggaactttggccgctcacttctggcgggctactgccccacatacatgcctgatcttgtgcttcatgggaccggcagtgatgagaagctgaagcagtgcctggtggccgaccttgtccacacagtccatcatccagtcctggatgagccaatagctgaagctgtctgtattatcgcagacacggataaatggagtgtgcaggtagctacaagtcagaggaaagtgacggacaacatgaaactaggccaggatgtcctggtctctagtcaggtgtccagtttgcttcagtccattttacagctctataagcttcacctccctgctgatttttgcatcatgcatcttgaagatagactacaggagatgtaccttaaaagtaaaatgctatctgaatatctccggggacacacacgagtccatgtgaaagaattaggtgtcgtactggggattgaatccaacgacctgcctctgttgactgctattgccagtactcattctccttatgtggctcaaatactcttataagctaaagctcaggacagttcttccttggaagaaaaaaatcaaattctcaactgaaggagaaaggaataagctctctgtgatgtcaaaagcatgagaagagcaaacagaaacagtcattccacctttttgttttgtgtttttgctgtcaagctgatgcttcattgaagacttaggtttacttgacataatagcatttgtgattgtcgtgaacactttaggccatttgttacccatgaatcaacaaagaaactgacctttttggtaggaggaaacataagcactaaacactaagctgttgcaacagattgccttgtgctgtttgggcagaataaagacaagtgacttgagcggggtggtcagcagtgtacataatattccagtaggaaactgcttccaagtttaagcatgagctccccaaactggagaaaacatattttgctattctgagacaacaatcagaatacagactttggattccaggtcacagtttgctttttagacaaggtaaagcaaagaaagccacattgtgccatcttcagctccagtggctttagcagtgactgtttgacataaaacatgtaagaattgcttgttgggaagagtgctttagggacccactgttttcatttcttcttggagtttaccttgtttcagatgcagccatgggtaggtcagagatggattgttggtgcaataaacccaagaatcaatgtagcctcttaatcccatcaagatgtagtttgtagcagcaaagtgtacagtctgaaaccgtatgttttatccttatattttagagctttcagcagcctttttaagagaggccacttaccaaagttatttctataagctcaagagtgtttcggttggtaagttcttccagctgaagccactttttccttatagttaatacaaatgactatttttactttaaaaggcacagctgtcctggtgggaaatgaaacctgcagcagttcaggatgactaatgaaagcaattagcttgaacatttagaaaaaattcatatatgatctaaatttttatattatcatttctgtgccttctaattcctgcatccttttcaaaacatctttccagacattaacttacacattgtataaaaccgaccaaaatgatttcctaaagttcatgcaaaaaaaaaaaaaaaacaacctaattttctgttaatataaaagaaacttcagtttactgaccgtgaaacagactatgtactgacatccagggtaaagtaaaagacttttaaatattggtcattaaaggacaggagctaagctagcaaagcaaaacatctttagcactttgcagatctcaagcagttaaccaggctctgattcccttccactgttttatgaattaattccagttcttttcatgtatctttgaacctaagattatgaagtaatttccctattagggactagaatgacttcagttttttcatttgataaaaatcagaactgctacctttcccttttttaatgatgcaaaatgtagatgagtgcattaagttttgtaagatctttatcattttatgtcattcattgaaaattgaaatgttcattctttttaatgttttcctatttccttttgcctagcatttgactttggtgttttaagttctgtagttccatgacatcattgtttgctgttgtgttacagagagagaaggaacctcacctgtggctcagctcaccccacatccgtttctcattacgtgtaaataaactgtcagagctgatgttacagcttttacagtttaaagcattcccctcgtctctagttccttttttcttgtttacatgttttgggcactttccctcattcaccaccttccagggtttcatagaaaataacttgttacaaaatcagttcaattctaatgtggacatagtggcatgttcataattagacccatataggggacactgagctttaaatcgttgattctaaactctatacattaaaaaaattcagcccaggcccctcaaagcctgagaaaatttaatttgctcttaatttaatgttccaaaactcactcttggaaaaatgcctgttggaaaactacaggtgggtcacatgtgggggctgtctccgtgacactcaggattccagtcagaacctaatcctcatatctattgcctacaaaaatagaccaagaatgttgctgctcttttataatcctttaaatatttaacattcaagttttctttgtcttaaattcagcctcttcctaaaagcaaaaaagaaaaaaaaaacctcacagaattgtgttgagatccaccgctcacacgccgtacaccacccagtggcttcattctggcttagccgcagaggcaagaaagggaccccacttgctcccatgcccacctcaagaaaaaacataaaacaattttttttaaaaaagaaaagaaatctacctcagttgacaggattccacctttagggtttcttcaacttttaagtcttacctgttgagtgtaacttttgtagcatcttgcttttccaagcaagctagtgaggcatgacagagcagaagtctgtaaatgtccctgtgatggacctctttctagcatgttgcagttttatttttaataaattggtaagtgaaatgaatgtaaaggtaattgtgtacgttttagacatgacaatgaaaatttaaaatgtagcttccatacttgtgcataattccaaagtattttattttttatcaatcagtgttaaatagctttttgtacaggcttcaatccatttttcgaagtgtgctgttttttaatgaaagtaactataatcttttcacatcccatggaactgccgtttacacattgcaactttttaaacttaaccatatttttcaaaattaacgtttttggagggagaaaaatccccgcttgctaaatgatactaaaccgttgtttgggctcttataattaggtcctgagattttataaaaatttagtctgtagctttttaggttcttcactagagttggttgtacataaaaataataaagaatataaagtatcccaaaattcttttaaagtctggatttttccgctaatatgtactttagagaatattttgttcatgcatacttccacgttaaattgaaaatgtcttcagcttctcttggtaaatgtgaaccatttgttttttattgtgcttgggggagagggtattttaatataatttttgcctaaatcaagaagtcccctctgaatgttaatttttaaatgtcaaaatatgatgaacgatatatcttgaaagtgagattgcaatatgcttaaacttaagtggtatttcaaaaacgagaaaattctggaatttgtcatttgaagctccataagagaaattgataggacttcgtttttgatcagtctgaatagataccaatgtcattgtgtgggaattttttttaacttgtttatgtattattttgatccatttttctgtggcatttggtgcaataaaacttttgaatttatcttgaa

SEQ ID NO: 4 - DNA, 6836 bp, Homo sapiens
  source 1..6836: mol_type = genomic DNA
agtcatatgaccggcagccggcggctccggcgccgagcagagttactcagtcgcagcggccccgcgctcccgcaaggctgggcggccgcgccgccgcgatggccccgccaccgcggccgccgcccccggctgcgcgctgagccgccggccccccgagcgccacggccggagctgcggcggcggcatcatggccccgaccctgctccagaagctcttcaacaaaaggggcagcagcggcagctccgcggcggcgtctgcccagggcagggctcctaaggaaggacccgcctttagttggtcatgttcggagtttgacctgaatgagattcgcctgatagtttaccaggactgtgacaggagaggcagacaagtcttgtttgactctaaagctgttcaaaagattgaggaggtgacagctcagaaaacagaggatgttcctattaaaatatcagccaagtgctgccagggaagcagcagtgtcagcagcagtagcagcagcagcatctcttcccacagttcttctgggggatcttcacatcatgctaaggaacagcttccaaagtaccagtacacaagaccagcttccgatgtcaacatgttaggggaaatgatgtttggctcagttgccatgagttacaaaggctccaccttaaagatacactacatacgttctcctccacaactgatgattagtaaagtcttctctgctagaatgggcagcttctgtggaagtacaaataacttgcaagacagctttgagtacatcaaccaagatcctaatttgggaaaactgaacacaaatcaaaatagtttgggtccttgtcgtactggaagtaacctagcacacagcacaccagttgatatgccaagcagaggacagaatgaagacagggacagtggcattgctcgatcagcctcactaagcagtcttttgatcacacctttcccatctccaagctcctctacatcttcttccagcagttaccagcgccgctggcttcgaagtcagacaacaagtttggaaaatggcatcatcccaagaaggctatgatctcctgtaggaaaatagcagaatcaagtctccgagtccagttttatgtcagccgtttgatggaagctctgggagaattcagaggaactatctggaacttatattctgttccaaggatagctgaacctgtatggcttactatgatgtccggcactttggaaaaaaaccagctctgccagcgctttctcaaggagtttacacttctgatagaacagataaataaaaaccagttttttgctgccttactgactgcggtgttaacctaccacctggcctgggtcccaactgtcatgcctgtggatcaccctcccatcaaagccttctcagagaaacgtacctcccagtcagtgaacatgctggccaaaacacatccgtataatcctctttgggcacagctgggtgatctttacggagccataggctctccagtgagactgactcgcaccgtagtggtagggaagcagaaggacttagtccagcgaatactttatgtcctgacctactttctccgttgctctgagctacaagagaaccagctgacctggagtggcaatcatggtgaaggtgaccaagttttaaatgggagcaagatcataacagccttggagaaaggagaggtggaggagtctgagtatgtggtcattacggtgaggaacgagcccgctcttgtaccccccatcctaccaccaacagcagcagagagacacaacccctggccgacagggtttcctgagtgcccagagggcactgacagtagagacctgggtcttaaacctgacaaagaagctaacaggaggccagagcagggttctgaggcttgcagcgcagggtgcctggggccagcatcagacgcttcctggaaacctcagaatgcattttgtggggatgagaaaaataaagaggcaccgcaagatggctcttcaagacttcccagctgtgaagttttgggggcaggaatgaagatggaccagcaagctgtctgtgagctgttgaaagtggagatgcctacaagactgccagaccggtcagtggcctggccttgccctgacagacatctccgggagaaaccttccttagaaaaggtcactttccagattggaagctttgcatctccagagtctgactttgaaagccgcatgaaaaaaatggaggaacgggtgaaggcctgtggcccctccttggaggccagtgaggctgctgatgtggctcaggacccgcaggtttctaggagcccttttaaacctggctttcaggagaatgtttgctgtcctcagaatcggctttcagagggggatgaaggcgagtctgacaagggttttgcagaggacagaggcagcagaaacgacatggcagcagatattgctgggcagctcagccacgctgctgacttgggcacagcctcccacggtgcaggaggaacgggagggaggaggctggaggccactagaggtttgtatgtgaaggctgcggaaggacctgtgctggagcctgttgcccccaggtgtgtccagcggggccctggcctcgtggctggtgcgaatatcccctgtggggatgacaacaagaaggccaacttcaggactgaaggagacattccccgaaatgaaagctcagatagcgccctgggagacagtgacgacgaagcctgcgcttcagccatgctagatctgggtcacggtggtgacaggactggagggtccttggaagtggagctgcctctgccaaggtctcagagcatcagcacccagaatgtaaggaactttggccgctcacttctggcgggctactgccccacatacatgcctgatcttgtgcttcatgggaccggcagtgatgagaagctgaagcagtgcctggtggccgaccttgtccacacagtccatcatccagtcctggatgagccaatagctgaagctgtctgtattatcgcagacacggataaatggagtgtgcaggtagctacaagtcagaggaaagtgacggacaacatgaaactaggccaggatgtcctggtctctagtcaggtgtccagtttgcttcagtccattttacagctctataagcttcacctccctgctgatttttgcatcatgcatcttgaagatagactacaggagatgtaccttaaaagtaaaatgctatctgaatatctccggggacacacacgagtccatgtgaaagaattaggtgtcgtactggggattgaatccaacgacctgcctctgttgactgctattgccagtactcattctccttatgtggctcaaatactcttataagctaaagctcaggacagttcttccttggaagaaaaaaatcaaattctcaactgaaggagaaaggaataagctctctgtgatgtcaaaagcatgagaagagcaaacagaaacagtcattccacctttttgttttgtgtttttgctgtcaagctgatgcttcattgaagacttaggtttacttgacataatagcatttgtgattgtcgtgaacactttaggccatttgttacccatgaatcaacaaagaaactgacctttttggtaggaggaaacataagcactaaacactaagctgttgcaacagattgccttgtgctgtttgggcagaataaagacaagtgacttgagcggggtggtcagcagtgtacataatattccagtaggaaactgcttccaagtttaagcatgagctccccaaactggagaaaacatattttgctattctgagacaacaatcagaatacagactttggattccaggtcacagtttgctttttagacaaggtaaagcaaagaaagccacattgtgccatcttcagctccagtggctttagcagtgactgtttgacataaaacatgtaagaattgcttgttgggaagagtgctttagggacccactgttttcatttcttcttggagtttaccttgtttcagatgcagccatgggtaggtcagagatggattgttggtgcaataaacccaagaatcaatgtagcctcttaatcccatcaagatgtagtttgtagcagcaaagtgtacagtctgaaaccgtatgttttatccttatattttagagctttcagcagcctttttaagagaggccacttaccaaagttatttctataagctcaagagtgtttcggttggtaagttcttccagctgaagccactttttccttatagttaatacaaatgactatttttactttaaaaggcacagctgtcctggtgggaaatgaaacctgcagcagttcaggatgactaatgaaagcaattagcttgaacatttagaaaaaattcatatatgatctaaatttttatattatcatttctgtgccttctaattcctgcatccttttcaaaacatctttccagacattaacttacacattgtataaaaccgaccaaaatgatttcctaaagttcatgcaaaaaaaaaaaaaaaacaacctaattttctgttaatataaaagaaacttcagtttactgaccgtgaaacagactatgtactgacatccagggtaaagtaaaagacttttaaatattggtcattaaaggacaggagctaagctagcaaagcaaaacatctttagcactttgcagatctcaagcagttaaccaggctctgattcccttccactgttttatgaattaattccagttcttttcatgtatctttgaacctaagattatgaagtaatttccctattagggactagaatgacttcagttttttcatttgataaaaatcagaactgctacctttcccttttttaatgatgcaaaatgtagatgagtgcattaagttttgtaagatctttatcattttatgtcattcattgaaaattgaaatgttcattctttttaatgttttcctatttccttttgcctagcatttgactttggtgttttaagttctgtagttccatgacatcattgtttgctgttgtgttacagagagagaaggaacctcacctgtggctcagctcaccccacatccgtttctcattacgtgtaaataaactgtcagagctgatgttacagcttttacagtttaaagcattcccctcgtctctagttccttttttcttgtttacatgttttgggcactttccctcattcaccaccttccagggtttcatagaaaataacttgttacaaaatcagttcaattctaatgtggacatagtggcatgttcataattagacccatataggggacactgagctttaaatcgttgattctaaactctatacattaaaaaaattcagcccaggcccctcaaagcctgagaaaatttaatttgctcttaatttaatgttccaaaactcactcttggaaaaatgcctgttggaaaactacaggtgggtcacatgtgggggctgtctccgtgacactcaggattccagtcagaacctaatcctcatatctattgcctacaaaaatagaccaagaatgttgctgctcttttataatcctttaaatatttaacattcaagttttctttgtcttaaattcagcctcttcctaaaagcaaaaaagaaaaaaaaaacctcacagaattgtgttgagatccaccgctcacacgccgtacaccacccagtggcttcattctggcttagccgcagaggcaagaaagggaccccacttgctcccatgcccacctcaagaaaaaacataaaacaattttttttaaaaaagaaaagaaatctacctcagttgacaggattccacctttagggtttcttcaacttttaagtcttacctgttgagtgtaacttttgtagcatcttgcttttccaagcaagctagtgaggcatgacagagcagaagtctgtaaatgtccctgtgatggacctctttctagcatgttgcagttttatttttaataaattggtaagtgaaatgaatgtaaaggtaattgtgtacgttttagacatgacaatgaaaatttaaaatgtagcttccatacttgtgcataattccaaagtattttattttttatcaatcagtgttaaatagctttttgtacaggcttcaatccatttttcgaagtgtgctgttttttaatgaaagtaactataatcttttcacatcccatggaactgccgtttacacattgcaactttttaaacttaaccatatttttcaaaattaacgtttttggagggagaaaaatccccgcttgctaaatgatactaaaccgttgtttgggctcttataattaggtcctgagattttataaaaatttagtctgtagctttttaggttcttcactagagttggttgtacataaaaataataaagaatataaagtatcccaaaattcttttaaagtctggatttttccgctaatatgtactttagagaatattttgttcatgcatacttccacgttaaattgaaaatgtcttcagcttctcttggtaaatgtgaaccatttgttttttattgtgcttgggggagagggtattttaatataatttttgcctaaatcaagaagtcccctctgaatgttaatttttaaatgtcaaaatatgatgaacgatatatcttgaaagtgagattgcaatatgcttaaacttaagtggtatttcaaaaacgagaaaattctggaatttgtcatttgaagctccataagagaaattgataggacttcgtttttgatcagtctgaatagataccaatgtcattgtgtgggaattttttttaacttgtttatgtattattttgatccatttttctgtggcatttggtgcaataaaacttttgaatttatcttgaa

SEQ ID NO: 5 - DNA, 7419 bp, Homo sapiens
  source 1..7419: mol_type = genomic DNA
acagatggagtgagtcagtccaagctgctcaacctgttaaatgtcttttctttgctaactggagtataagcttaagaacaaaagtaggacttgtctatgtttgtaatgggattgcagacagcgtgttttgtaatgtgatagatggatctgacttcctaaattattggcaggcttaatttacgtaacaaatgaatgttccacctttttttttttttaaacctttgaaaggggaaattagtacactgctgtcaagtagcttttctcacatactgtatagggagtgaaatgattgtttagaactgctggtcattacagaatgttcctcacataacaaaggaacttcaggatttgtctccaagtccatgtttatggtcaggataaaccagaagaacattaaaccgttcaggagatgtgcggcggcacagcgaacaccacaaaccagccagagagctggcaagactctgccagatgtgtgagtgatgctgttcctggtgctgggaggatttacagggcgcttttatgcacaaagattaaaaaacacaccggagtagacaggagcactgaccacacggaactcgacaacagttggtcatgttcggagtttgacctgaatgagattcgcctgatagtttaccaggactgtgacaggagaggcagacaagtcttgtttgactctaaagctgttcaaaagattgaggaggtgacagctcagaaaacagaggatgttcctattaaaatatcagccaagtgctgccagggaagcagcagtgtcagcagcagtagcagcagcagcatctcttcccacagttcttctgggggatcttcacatcatgctaaggaacagcttccaaagtaccagtacacaagaccagcttccgatgtcaacatgttaggggaaatgatgtttggctcagttgccatgagttacaaaggctccaccttaaagatacactacatacgttctcctccacaactgatgattagtaaagtcttctctgctagaatgggcagcttctgtggaagtacaaataacttgcaagacagctttgagtacatcaaccaagatcctaatttgggaaaactgaacacaaatcaaaatagtttgggtccttgtcgtactggaagtaacctaggtctgctgcaagcatgcagcagcaaactgctgcagggggtagctgaaggaggacctctccggctcacccggagtgcttctttctttgcagcacacagcacaccagttgatatgccaagcagaggacagaatgaagacagggacagtggcattgctcgatcagcctcactaagcagtcttttgatcacacctttcccatctccaagctcctctacatcttcttccagcagttaccagcgccgctggcttcgaagtcagacaacaagtttggaaaatggcatcatcccaagaaggtcaactgatgagacattcagcttggctgaagaaacctgtagctctaatccagctatggttaggaggaagaaaattgccataagcatcatcttttccctatgtgagaaagaagaagcacaaaggaatttccaggacttcttcttttctcattttcccctgtttgaatctcacatgaacaggctgaagagtgcaattgaaaaggctatgatctcctgtaggaaaatagcagaatcaagtctccgagtccagttttatgtcagccgtttgatggaagctctgggagaattcagaggaactatctggaacttatattctgttccaaggatagctgaacctgtatggcttactatgatgtccggcactttggaaaaaaaccagctctgccagcgctttctcaaggagtttacacttctgatagaacagataaataaaaaccagttttttgctgccttactgactgcggtgttaacctaccacctggcctgggtcccaactgtcatgcctgtggatcaccctcccatcaaagccttctcagagaaacgtacctcccagtcagtgaacatgctggccaaaacacatccgtataatcctctttgggcacagctgggtgatctttacggagccataggctctccagtgagactgactcgcaccgtagtggtagggaagcagaaggacttagtccagcgaatactttatgtcctgacctactttctccgttgctctgagctacaagagaaccagctgacctggagtggcaatcatggtgaaggtgaccaagttttaaatgggagcaagatcataacagccttggagaaaggagaggtggaggagtctgagtatgtggtcattacggtgaggaacgagcccgctcttgtaccccccatcctaccaccaacagcagcagagagacacaacccctggccgacagggtttcctgagtgcccagagggcactgacagtagagacctgggtcttaaacctgacaaagaagctaacaggaggccagagcagggttctgaggcttgcagcgcagggtgcctggggccagcatcagacgcttcctggaaacctcagaatgcattttgtggggatgagaaaaataaagaggcaccgcaagatggctcttcaagacttcccagctgtgaagttttgggggcaggaatgaagatggaccagcaagctgtctgtgagctgttgaaagtggagatgcctacaagactgccagaccggtcagtggcctggccttgccctgacagacatctccgggagaaaccttccttagaaaaggtcactttccagattggaagctttgcatctccagagtctgactttgaaagccgcatgaaaaaaatggaggaacgggtgaaggcctgtggcccctccttggaggccagtgaggctgctgatgtggctcaggacccgcaggtttctaggagcccttttaaacctggctttcaggagaatgtttgctgtcctcagaatcggctttcagagggggatgaaggcgagtctgacaagggttttgcagaggacagaggcagcagaaacgacatggcagcagatattgctgggcagctcagccacgctgctgacttgggcacagcctcccacggtgcaggaggaacgggagggaggaggctggaggccactagaggtttgtatgtgaaggctgcggaaggacctgtgctggagcctgttgcccccaggtgtgtccagcggggccctggcctcgtggctggtgcgaatatcccctgtggggatgacaacaagaaggccaacttcaggactgaaggagacattccccgaaatgaaagctcagatagcgccctgggagacagtgacgacgaagcctgcgcttcagccatgctagatctgggtcacggtggtgacaggactggagggtccttggaagtggagctgcctctgccaaggtctcagagcatcagcacccagaatgtaaggaactttggccgctcacttctggcgggctactgccccacatacatgcctgatcttgtgcttcatgggaccggcagtgatgagaagctgaagcagtgcctggtggccgaccttgtccacacagtccatcatccagtcctggatgagccaatagctgaagctgtctgtattatcgcagacacggataaatggagtgtgcaggtagctacaagtcagaggaaagtgacggacaacatgaaactaggccaggatgtcctggtctctagtcaggtgtccagtttgcttcagtccattttacagctctataagcttcacctccctgctgatttttgcatcatgcatcttgaagatagactacaggagatgtaccttaaaagtaaaatgctatctgaatatctccggggacacacacgagtccatgtgaaagaattaggtgtcgtactggggattgaatccaacgacctgcctctgttgactgctattgccagtactcattctccttatgtggctcaaatactcttataagctaaagctcaggacagttcttccttggaagaaaaaaatcaaattctcaactgaaggagaaaggaataagctctctgtgatgtcaaaagcatgagaagagcaaacagaaacagtcattccacctttttgttttgtgtttttgctgtcaagctgatgcttcattgaagacttaggtttacttgacataatagcatttgtgattgtcgtgaacactttaggccatttgttacccatgaatcaacaaagaaactgacctttttggtaggaggaaacataagcactaaacactaagctgttgcaacagattgccttgtgctgtttgggcagaataaagacaagtgacttgagcggggtggtcagcagtgtacataatattccagtaggaaactgcttccaagtttaagcatgagctccccaaactggagaaaacatattttgctattctgagacaacaatcagaatacagactttggattccaggtcacagtttgctttttagacaaggtaaagcaaagaaagccacattgtgccatcttcagctccagtggctttagcagtgactgtttgacataaaacatgtaagaattgcttgttgggaagagtgctttagggacccactgttttcatttcttcttggagtttaccttgtttcagatgcagccatgggtaggtcagagatggattgttggtgcaataaacccaagaatcaatgtagcctcttaatcccatcaagatgtagtttgtagcagcaaagtgtacagtctgaaaccgtatgttttatccttatattttagagctttcagcagcctttttaagagaggccacttaccaaagttatttctataagctcaagagtgtttcggttggtaagttcttccagctgaagccactttttccttatagttaatacaaatgactatttttactttaaaaggcacagctgtcctggtgggaaatgaaacctgcagcagttcaggatgactaatgaaagcaattagcttgaacatttagaaaaaattcatatatgatctaaatttttatattatcatttctgtgccttctaattcctgcatccttttcaaaacatctttccagacattaacttacacattgtataaaaccgaccaaaatgatttcctaaagttcatgcaaaaaaaaaaaaaaaacaacctaattttctgttaatataaaagaaacttcagtttactgaccgtgaaacagactatgtactgacatccagggtaaagtaaaagacttttaaatattggtcattaaaggacaggagctaagctagcaaagcaaaacatctttagcactttgcagatctcaagcagttaaccaggctctgattcccttccactgttttatgaattaattccagttcttttcatgtatctttgaacctaagattatgaagtaatttccctattagggactagaatgacttcagttttttcatttgataaaaatcagaactgctacctttcccttttttaatgatgcaaaatgtagatgagtgcattaagttttgtaagatctttatcattttatgtcattcattgaaaattgaaatgttcattctttttaatgttttcctatttccttttgcctagcatttgactttggtgttttaagttctgtagttccatgacatcattgtttgctgttgtgttacagagagagaaggaacctcacctgtggctcagctcaccccacatccgtttctcattacgtgtaaataaactgtcagagctgatgttacagcttttacagtttaaagcattcccctcgtctctagttccttttttcttgtttacatgttttgggcactttccctcattcaccaccttccagggtttcatagaaaataacttgttacaaaatcagttcaattctaatgtggacatagtggcatgttcataattagacccatataggggacactgagctttaaatcgttgattctaaactctatacattaaaaaaattcagcccaggcccctcaaagcctgagaaaatttaatttgctcttaatttaatgttccaaaactcactcttggaaaaatgcctgttggaaaactacaggtgggtcacatgtgggggctgtctccgtgacactcaggattccagtcagaacctaatcctcatatctattgcctacaaaaatagaccaagaatgttgctgctcttttataatcctttaaatatttaacattcaagttttctttgtcttaaattcagcctcttcctaaaagcaaaaaagaaaaaaaaaacctcacagaattgtgttgagatccaccgctcacacgccgtacaccacccagtggcttcattctggcttagccgcagaggcaagaaagggaccccacttgctcccatgcccacctcaagaaaaaacataaaacaattttttttaaaaaagaaaagaaatctacctcagttgacaggattccacctttagggtttcttcaacttttaagtcttacctgttgagtgtaacttttgtagcatcttgcttttccaagcaagctagtgaggcatgacagagcagaagtctgtaaatgtccctgtgatggacctctttctagcatgttgcagttttatttttaataaattggtaagtgaaatgaatgtaaaggtaattgtgtacgttttagacatgacaatgaaaatttaaaatgtagcttccatacttgtgcataattccaaagtattttattttttatcaatcagtgttaaatagctttttgtacaggcttcaatccatttttcgaagtgtgctgttttttaatgaaagtaactataatcttttcacatcccatggaactgccgtttacacattgcaactttttaaacttaaccatatttttcaaaattaacgtttttggagggagaaaaatccccgcttgctaaatgatactaaaccgttgtttgggctcttataattaggtcctgagattttataaaaatttagtctgtagctttttaggttcttcactagagttggttgtacataaaaataataaagaatataaagtatcccaaaattcttttaaagtctggatttttccgctaatatgtactttagagaatattttgttcatgcatacttccacgttaaattgaaaatgtcttcagcttctcttggtaaatgtgaaccatttgttttttattgtgcttgggggagagggtattttaatataatttttgcctaaatcaagaagtcccctctgaatgttaatttttaaatgtcaaaatatgatgaacgatatatcttgaaagtgagattgcaatatgcttaaacttaagtggtatttcaaaaacgagaaaattctggaatttgtcatttgaagctccataagagaaattgataggacttcgtttttgatcagtctgaatagataccaatgtcattgtgtgggaattttttttaacttgtttatgtattattttgatccatttttctgtggcatttggtgcaataaaacttttgaatttatcttgaa

SEQ ID NO: 6 - DNA, 7108 bp, Homo sapiens
  source 1..7108: mol_type = genomic DNA
tctcacatactgtatagggagtgaaatgattgtttagaactgctggtcattacagaatgttcctcacataacaaaggaacttcaggatttgtctccaagtccatgtttatggtcaggataaaccagaagaacattaaaccgttcaggagatgtgcggcggcacagcgaacaccacaaaccagccagagagctggcaagactctgccagatgtgtgagtgatgctgttcctggtgctgggaggatttacagggcgcttttatgcacaaagattaaaaaacacaccggagtagacaggagcactgaccacacggaactcgacaacagttggtcatgttcggagtttgacctgaatgagattcgcctgatagtttaccaggactgtgacaggagaggcagacaagtcttgtttgactctaaagctgttcaaaagattgaggaggtgacagctcagaaaacagaggatgttcctattaaaatatcagccaagtgctgccagggaagcagcagtgtcagcagcagtagcagcagcagcatctcttcccacagttcttctgggggatcttcacatcatgctaaggaacagcttccaaagtaccagtacacaagaccagcttccgatgtcaacatgttaggggaaatgatgtttggctcagttgccatgagttacaaaggctccaccttaaagatacactacatacgttctcctccacaactgatgattagtaaagtcttctctgctagaatgggcagcttctgtggaagtacaaataacttgcaagacagctttgagtacatcaaccaagatcctaatttgggaaaactgaacacaaatcaaaatagtttgggtccttgtcgtactggaagtaacctaggtctgctgcaagcatgcagcagcaaactgctgcagggggtagctgaaggaggacctctccggctcacccggagtgcttctttctttgcagcacacagcacaccagttgatatgccaagcagaggacagaatgaagacagggacagtggcattgctcgatcagcctcactaagcagtcttttgatcacacctttcccatctccaagctcctctacatcttcttccagcagttaccagcgccgctggcttcgaagtcagacaacaagtttggaaaatggcatcatcccaagaaggtcaactgatgagacattcagcttggctgaagaaacctgtagctctaatccagctatggttaggaggaagaaaattgccataagcatcatcttttctcattttcccctgtttgaatctcacatgaacaggctgaagagtgcaattgaaaaggctatgatctcctgtaggaaaatagcagaatcaagtctccgagtccagttttatgtcagccgtttgatggaagctctgggagaattcagaggaactatctggaacttatattctgttccaaggatagctgaacctgtatggcttactatgatgtccggcactttggaaaaaaaccagctctgccagcgctttctcaaggagtttacacttctgatagaacagataaataaaaaccagttttttgctgccttactgactgcggtgttaacctaccacctggcctgggtcccaactgtcatgcctgtggatcaccctcccatcaaagccttctcagagaaacgtacctcccagtcagtgaacatgctggccaaaacacatccgtataatcctctttgggcacagctgggtgatctttacggagccataggctctccagtgagactgactcgcaccgtagtggtagggaagcagaaggacttagtccagcgaatactttatgtcctgacctactttctccgttgctctgagctacaagagaaccagctgacctggagtggcaatcatggtgaaggtgaccaagttttaaatgggagcaagatcataacagccttggagaaaggagaggtggaggagtctgagtatgtggtcattacggtgaggaacgagcccgctcttgtaccccccatcctaccaccaacagcagcagagagacacaacccctggccgacagggtttcctgagtgcccagagggcactgacagtagagacctgggtcttaaacctgacaaagaagctaacaggaggccagagcagggttctgaggcttgcagcgcagggtgcctggggccagcatcagacgcttcctggaaacctcagaatgcattttgtggggatgagaaaaataaagaggcaccgcaagatggctcttcaagacttcccagctgtgaagttttgggggcaggaatgaagatggaccagcaagctgtctgtgagctgttgaaagtggagatgcctacaagactgccagaccggtcagtggcctggccttgccctgacagacatctccgggagaaaccttccttagaaaaggtcactttccagattggaagctttgcatctccagagtctgactttgaaagccgcatgaaaaaaatggaggaacgggtgaaggcctgtggcccctccttggaggccagtgaggctgctgatgtggctcaggacccgcaggtttctaggagcccttttaaacctggctttcaggagaatgtttgctgtcctcagaatcggctttcagagggggatgaaggcgagtctgacaagggttttgcagaggacagaggcagcagaaacgacatggcagcagatattgctgggcagctcagccacgctgctgacttgggcacagcctcccacggtgcaggaggaacgggagggaggaggctggaggccactagaggtttgtatgtgaaggctgcggaaggacctgtgctggagcctgttgcccccaggtgtgtccagcggggccctggcctcgtggctggtgcgaatatcccctgtggggatgacaacaagaaggccaacttcaggactgaaggagacattccccgaaatgaaagctcagatagcgccctgggagacagtgacgacgaagcctgcgcttcagccatgctagatctgggtcacggtggtgacaggactggagggtccttggaagtggagctgcctctgccaaggtctcagagcatcagcacccagaatgtaaggaactttggccgctcacttctggcgggctactgccccacatacatgcctgatcttgtgcttcatgggaccggcagtgatgagaagctgaagcagtgcctggtggccgaccttgtccacacagtccatcatccagtcctggatgagccaatagctgaagctgtctgtattatcgcagacacggataaatggagtgtgcaggtagctacaagtcagaggaaagtgacggacaacatgaaactaggccaggatgtcctggtctctagtcaggtgtccagtttgcttcagtccattttacagctctataagcttcacctccctgctgatttttgcatcatgcatcttgaagatagactacaggagatgtaccttaaaagtaaaatgctatctgaatatctccggggacacacacgagtccatgtgaaagaattaggtgtcgtactggggattgaatccaacgacctgcctctgttgactgctattgccagtactcattctccttatgtggctcaaatactcttataagctaaagctcaggacagttcttccttggaagaaaaaaatcaaattctcaactgaaggagaaaggaataagctctctgtgatgtcaaaagcatgagaagagcaaacagaaacagtcattccacctttttgttttgtgtttttgctgtcaagctgatgcttcattgaagacttaggtttacttgacataatagcatttgtgattgtcgtgaacactttaggccatttgttacccatgaatcaacaaagaaactgacctttttggtaggaggaaacataagcactaaacactaagctgttgcaacagattgccttgtgctgtttgggcagaataaagacaagtgacttgagcggggtggtcagcagtgtacataatattccagtaggaaactgcttccaagtttaagcatgagctccccaaactggagaaaacatattttgctattctgagacaacaatcagaatacagactttggattccaggtcacagtttgctttttagacaaggtaaagcaaagaaagccacattgtgccatcttcagctccagtggctttagcagtgactgtttgacataaaacatgtaagaattgcttgttgggaagagtgctttagggacccactgttttcatttcttcttggagtttaccttgtttcagatgcagccatgggtaggtcagagatggattgttggtgcaataaacccaagaatcaatgtagcctcttaatcccatcaagatgtagtttgtagcagcaaagtgtacagtctgaaaccgtatgttttatccttatattttagagctttcagcagcctttttaagagaggccacttaccaaagttatttctataagctcaagagtgtttcggttggtaagttcttccagctgaagccactttttccttatagttaatacaaatgactatttttactttaaaaggcacagctgtcctggtgggaaatgaaacctgcagcagttcaggatgactaatgaaagcaattagcttgaacatttagaaaaaattcatatatgatctaaatttttatattatcatttctgtgccttctaattcctgcatccttttcaaaacatctttccagacattaacttacacattgtataaaaccgaccaaaatgatttcctaaagttcatgcaaaaaaaaaaaaaaaacaacctaattttctgttaatataaaagaaacttcagtttactgaccgtgaaacagactatgtactgacatccagggtaaagtaaaagacttttaaatattggtcattaaaggacaggagctaagctagcaaagcaaaacatctttagcactttgcagatctcaagcagttaaccaggctctgattcccttccactgttttatgaattaattccagttcttttcatgtatctttgaacctaagattatgaagtaatttccctattagggactagaatgacttcagttttttcatttgataaaaatcagaactgctacctttcccttttttaatgatgcaaaatgtagatgagtgcattaagttttgtaagatctttatcattttatgtcattcattgaaaattgaaatgttcattctttttaatgttttcctatttccttttgcctagcatttgactttggtgttttaagttctgtagttccatgacatcattgtttgctgttgtgttacagagagagaaggaacctcacctgtggctcagctcaccccacatccgtttctcattacgtgtaaataaactgtcagagctgatgttacagcttttacagtttaaagcattcccctcgtctctagttccttttttcttgtttacatgttttgggcactttccctcattcaccaccttccagggtttcatagaaaataacttgttacaaaatcagttcaattctaatgtggacatagtggcatgttcataattagacccatataggggacactgagctttaaatcgttgattctaaactctatacattaaaaaaattcagcccaggcccctcaaagcctgagaaaatttaatttgctcttaatttaatgttccaaaactcactcttggaaaaatgcctgttggaaaactacaggtgggtcacatgtgggggctgtctccgtgacactcaggattccagtcagaacctaatcctcatatctattgcctacaaaaatagaccaagaatgttgctgctcttttataatcctttaaatatttaacattcaagttttctttgtcttaaattcagcctcttcctaaaagcaaaaaagaaaaaaaaaacctcacagaattgtgttgagatccaccgctcacacgccgtacaccacccagtggcttcattctggcttagccgcagaggcaagaaagggaccccacttgctcccatgcccacctcaagaaaaaacataaaacaattttttttaaaaaagaaaagaaatctacctcagttgacaggattccacctttagggtttcttcaacttttaagtcttacctgttgagtgtaacttttgtagcatcttgcttttccaagcaagctagtgaggcatgacagagcagaagtctgtaaatgtccctgtgatggacctctttctagcatgttgcagttttatttttaataaattggtaagtgaaatgaatgtaaaggtaattgtgtacgttttagacatgacaatgaaaatttaaaatgtagcttccatacttgtgcataattccaaagtattttattttttatcaatcagtgttaaatagctttttgtacaggcttcaatccatttttcgaagtgtgctgttttttaatgaaagtaactataatcttttcacatcccatggaactgccgtttacacattgcaactttttaaacttaaccatatttttcaaaattaacgtttttggagggagaaaaatccccgcttgctaaatgatactaaaccgttgtttgggctcttataattaggtcctgagattttataaaaatttagtctgtagctttttaggttcttcactagagttggttgtacataaaaataataaagaatataaagtatcccaaaattcttttaaagtctggatttttccgctaatatgtactttagagaatattttgttcatgcatacttccacgttaaattgaaaatgtcttcagcttctcttggtaaatgtgaaccatttgttttttattgtgcttgggggagagggtattttaatataatttttgcctaaatcaagaagtcccctctgaatgttaatttttaaatgtcaaaatatgatgaacgatatatcttgaaagtgagattgcaatatgcttaaacttaagtggtatttcaaaaacgagaaaattctggaatttgtcatttgaagctccataagagaaattgataggacttcgtttttgatcagtctgaatagataccaatgtcattgtgtgggaattttttttaacttgtttatgtattattttgatccatttttctgtggcatttggtgcaataaaacttttgaatttatcttgaa

SEQ ID NO: 7 - DNA, 5235 bp, Homo sapiens
  source 1..5235: mol_type = genomic DNA
agctgcggcggcggcatcatggccccgaccctgctccagaagctcttcaacaaaaggggcagcagcggcagctccgcggcggcgtctgcccagggcagggctcctaaggaaggacccgcctttagttggtcatgttcggagtttgacctgaatgagattcgcctgatagtttaccaggactgtgacaggagaggcagacaagtcttgtttgactctaaagctgttcaaaagattgaggaggtgacagctcagaaaacagaggatgttcctattaaaatatcagccaagtgctgccagggaagcagcagtgtcagcagcagtagcagcagcagcatctcttcccacagttcttctgggggatcttcacatcatgctaaggaacagcttccaaagtaccagtacacaagaccagcttccgatgtcaacatgttaggggaaatgatgtttggctcagttgccatgagttacaaaggctccaccttaaagatacactacatacgttctcctccacaactgatgattagtaaagtcttctctgctagaatgggcagcttctgtggaagtacaaataacttgcaagacagctttgagtacatcaaccaagatcctaatttgggaaaactgaacacaaatcaaaatagtttgggtccttgtcgtactggaagtaacctaggtctgctgcaagcatgcagcagcaaactgctgcagggggtagctgaaggaggacctctccggctcacccggagtgcttctttctttgcagcacacagcacaccagttgatatgccaagcagaggacagaatgaagacagggacagtggcattgctcgatcagcctcactaagcagtcttttgatcacacctttcccatctccaagctcctctacatcttcttccagcagttaccagcgccgctggcttcgaagtcagacaacaagtttggaaaatggcatcatcccaagaaggtcaactgatgagacattcagcttggctgaagaaacctgtagctctaatccagctatggttaggaggaagaaaattgccataagcatcatcttttccctatgtgagaaagaagaagcacaaaggaatttccaggacttcttcttttctcattttcccctgtttgaatctcacatgaacaggctgaagagtgcaattgaaaaggctatgatctcctgtaggaaaatagcagaatcaagtctccgagtccagttttatgtcagccgtttgatggaagctctgggagaattcagaggaactatctggaacttatattctgttccaaggatagctgaacctgtatggcttactatgatgtccggcactttggaaaaaaaccagctctgccagcgctttctcaaggagtttacacttctgatagaacagataaataaaaaccagttttttgctgccttactgactgcggtgttaacctaccacctggcctgggtcccaactgtcatgcctgtggatcaccctcccatcaaagccttctcagagaaacgtacctcccagtcagtgaacatgctggccaaaacacatccgtataatcctctttgggcacagctgggtgatctttacggagccataggctctccagtgagactgactcgcaccgtagtggtagggaagcagaaggacttagtccagcgaatactttatgtcctgacctactttctccgttgctctgagctacaagagaaccagctgacctggagtggcaatcatggtgaaggtgaccaagttttaaatgggagcaagatcataacagccttggagaaaggagaggtggaggagtctgagtatgtggtcattacggtgaggaacgagcccgctcttgtaccccccatcctaccaccaacagcagcagagagacacaacccctggccgacagggtttcctgagtgcccagagggcactgacagtagagacctgggtcttaaacctgacaaagaagctaacaggaggccagagcagggttctgaggcttgcagcgcagggtgcctggggccagcatcagacgcttcctggaaacctcagaatgcattttgtggggatgagaaaaataaagaggcaccgcaagatggctcttcaagacttcccagctgtgaagttttgggggcaggaatgaagatggaccagcaagctgtctgtgagctgttgaaagtggagatgcctacaagactgccagaccggtcagtggcctggccttgccctgacagacatctccgggagaaaccttccttagaaaaggtcactttccagattggaagctttgcatctccagagtctgactttgaaagccgcatgaaaaaaatggaggaacgggtgaaggcctgtggcccctccttggaggccagtgaggctgctgatgtggctcaggacccgcaggtttctaggagcccttttaaacctggctttcaggagaatgtttgctgtcctcagaatcggctttcagagggggatgaaggcgagtctgacaagggttttgcagaggacagaggcagcagaaacgacatggcagcagatattgctgggcagctcagccacgctgctgacttgggcacagcctcccacggtgcaggaggaacgggagggaggaggctggaggccactagaggtttgtatgtgaaggctgcggaaggacctgtgctggagcctgttgcccccaggtgtgtccagcggggccctggcctcgtggctggtgcgaatatcccctgtggggatgacaacaagaaggccaacttcaggactgaaggagacattccccgaaatgaaagctcagatagcgccctgggagacagtgacgacgaagcctgcgcttcagccatgctagatctgggtcacggtggtgacaggactggagggtccttggaagtggagctgcctctgccaaggtctcagagcatcagcacccagaatgtaaggaactttggccgctcacttctggcgggctactgccccacatacatgcctgatcttgtgcttcatgggaccggcagtgatgagaagctgaagcagtgcctggtggccgaccttgtccacacagtccatcatccagtcctggatgagccaatagctgaagctgtctgtattatcgcagacacggataaatggagtgtgcaggtagctacaagtcagaggaaagtgacggacaacatgaaactaggccaggatgtcctggtctctagtcaggtgtccagtttgcttcagtccattttacagctctataagcttcacctccctgctgatttttgcatcatgcatcttgaagatagactacaggagatgtaccttaaaagtaaaatgctatctgaatatctccggggacacacacgagtccatgtgaaagaattaggtgtcgtactggggattgaatccaacgacctgcctctgttgactgctattgccagtactcattctccttatgtggctcaaatactcttataagctaaagctcaggacagttcttccttggaagaaaaaaatcaaattctcaactgaaggagaaaggaataagctctctgtgatgtcaaaagcatgagaagagcaaacagaaacagtcattccacctttttgttttgtgtttttgctgtcaagctgatgcttcattgaagacttaggtttacttgacataatagcatttgtgattgtcgtgaacactttaggccatttgttacccatgaatcaacaaagaaactgacctttttggtaggaggaaacataagcactaaacactaagctgttgcaacagattgccttgtgctgtttgggcagaataaagacaagtgacttgagcggggtggtcagcagtgtacataatattccagtaggaaactgcttccaagtttaagcatgagctccccaaactggagaaaacatattttgctattctgagacaacaatcagaatacagactttggattccaggtcacagtttgctttttagacaaggtaaagcaaagaaagccacattgtgccatcttcagctccagtggctttagcagtgactgtttgacataaaacatgtaagaattgcttgttgggaagagtgctttagggacccactgttttcatttcttcttggagtttaccttgtttcagatgcagccatgggtaggtcagagatggattgttggtgcaataaacccaagaatcaatgtagcctcttaatcccatcaagatgtagtttgtagcagcaaagtgtacagtctgaaaccgtatgttttatccttatattttagagctttcagcagcctttttaagagaggccacttaccaaagttatttctataagctcaagagtgtttcggttggtaagttcttccagctgaagccactttttccttatagttaatacaaatgactatttttactttaaaaggcacagctgtcctggtgggaaatgaaacctgcagcagttcaggatgactaatgaaagcaattagcttgaacatttagaaaaaattcatatatgatctaaatttttatattatcatttctgtgccttctaattcctgcatccttttcaaaacatctttccagacattaacttacacattgtataaaaccgaccaaaatgatttcctaaagttcatgcaaaaaaaaaaaaaaaacaacctaattttctgttaatataaaagaaacttcagtttactgaccgtgaaacagactatgtactgacatccagggtaaagtaaaagacttttaaatattggtcattaaaggacaggagctaagctagcaaagcaaaacatctttagcactttgcagatctcaagcagttaaccaggctctgattcccttccactgttttatgaattaattccagttcttttcatgtatctttgaacctaagattatgaagtaatttccctattagggactagaatgacttcagttttttcatttgataaaaatcagaactgctacctttcccttttttaatgatgcaaaatgtagatgagtgcattaagttttgtaagatctttatcattttatgtcattcattgaaaattgaaatgttcattctttttaatgttttcctatttccttttgcctagcatttgactttggtgttttaagttctgtagttccatgacatcattgtttgctgttgtgttacagagagagaaggaacctcacctgtggctcagctcaccccacatccgtttctcattacgtgtaaataaactgtcagagctgatgttacagcttttacagtttaaagca

SEQ ID NO: 8 - DNA, 6327 bp, Homo sapiens
  source 1..6327: mol_type = genomic DNA
tctcacatactgtatagggagtgaaatgattgtttagaactgctggtcattacagaatgttcctcacataacaaaggaacttcaggatttgtctccaagtccatgtttatggtcaggataaaccagaagaacattaaaccgttcaggagatgtgcggcggcacagcgaacaccacaaaccagccagagagctggcaagactctgccagatgtgtgagtgatgctgttcctggtgctgggaggatttacagggcgcttttatgcacaaagattaaaaaacacaccggagtagacaggagcactgaccacacggaactcgacaacagttggtcatgttcggagtttgacctgaatgagattcgcctgatagtttaccaggactgtgacaggagaggcagacaagtcttgtttgactctaaagctgttcaaaagattgaggaggtgacagctcagaaaacagaggatgttcctattaaaatatcagccaagtgctgccagggaagcagcagtgtcagcagcagtagcagcagcagcatctcttcccacagttcttctgggggatcttcacatcatgctaaggaacagcttccaaagtaccagtacacaagaccagcttccgatgtcaacatgttaggggaaatgatgtttggctcagttgccatgagttacaaaggctccaccttaaagatacactacatacgttctcctccacaactgatgattagtaaagtcttctctgctagaatgggcagcttctgtggaagtacaaataacttgcaagacagctttgagtacatcaaccaagatcctaatttgggaaaactgaacacaaatcaaaatagtttgggtccttgtcgtactggaagtaacctaggtctgctgcaagcatgcagcagcaaactgctgcagggggtagctgaaggaggacctctccggctcacccggagtgcttctttctttgcagcacacagcacaccagttgatatgccaagcagaggacagaatgaagacagggacagtggcattgctcgatcagcctcactaagcagtcttttgatcacacctttcccatctccaagctcctctacatcttcttccagcagttaccagcgccgctggcttcgaagtcagacaacaagtttggaaaatggcatcatcccaagaaggtcaactgatgagacattcagcttggctgaagaaacctgtagctctaatccagctatggttaggaggaagaaaattgccataagcatcatcttttccctatgtgagaaagaagaagcacaaaggaatttccaggacttcttcttttctcattttcccctgtttgaatctcacatgaacaggctgaagagtgcaattgaaaaggctatgatctcctgtaggaaaatagcagaatcaagtctccgagtccagttttatgtcagccgtttgatggaagctctgggagaattcagaggaactatctggaacttatattctgttccaaggatagctgaacctgtatggcttactatgatgtccggcactttggaaaaaaaccagctctgccagcgctttctcaaggagtttacacttctgatagaacagataaataaaaaccagttttttgctgccttactgactgcggtgttaacctaccacctggcctgggtcccaactgtcatgcctgtggatcaccctcccatcaaagccttctcagagaaacgtacctcccagtcagtgaacatgctggccaaaacacatccgtataatcctctttgggcacagctgggtgatctttacggagccataggctctccagtgagactgactcgcaccgtagtggtagggaagcagaaggacttagtccagcgaatactttatgtcctgacctactttctccgttgctctgagctacaagagaaccagctgacctggagtggcaatcatggtgaaggtgaccaagttttaaatgggagcaagatcataacagccttggagaaaggagaggtggaggagtctgagtatgtggtcattacggtgaggaacgagcccgctcttgtaccccccatcctaccaccaacagcagcagagagacacaacccctggccgacagggtttcctgagtgcccagagggcactgacagtagagacctgggtcttaaacctgacaaagaagctaacaggaggccagagcagggttctgaggcttgcagcgcagggtgcctggggccagcatcagacgcttcctggaaacctcagaatgcattttgtggggatgagaaaaataaagaggcaccgcaagatggctcttcaagacttcccagctgtgaagttttgggggcaggaatgaagatggaccagcaagctgtctgtgagctgttgaaagtggagatgcctacaagactgccagaccggtcagtggcctggccttgccctgacagacatctccgggagaaaccttccttagaaaaggtcactttccagattggaagctttgcatctccagagtctgactttgaaagccgcatgaaaaaaatggaggaacgggtgaaggcctgtggcccctccttggaggccagtgaggctgctgatgtggctcaggacccgcaggtttctaggagcccttttaaacctggctttcaggagaatgtttgctgtcctcagaatcggctttcagagggggatgaaggcgagtctgacaagggttttgcagaggacagaggcagcagaaacgacatggcagcagatattgctgggcagctcagccacgctgctgacttgggcacagcctcccacggtgcaggaggaacgggagggaggaggctggaggccactagaggtttgtatgtgaaggctgcggaaggacctgtgctggagcctgttgcccccaggtgtgtccagcggggccctggcctcgtggctggtgcgaatatcccctgtggggatgacaacaagaaggccaacttcaggactgaaggagacattccccgaaatgaaagctcagatagcgccctgggagacagtgacgacgaagcctgcgcttcagccatgctagatctgggtcacggtggtgacaggactggagggtccttggaagtggagctgcctctgccaaggtctcagagcatcagcacccagaatgtaaggaactttggccgctcacttctggcgggctactgccccacatacatgcctgatcttgtgcttcatgggaccggcagtgatgagaagctgaagcagtgcctggtggccgaccttgtccacacagtccatgtggaacaaaaggcattgcatgttatctttggccttgagcatctcctctgtgaagaccaaacatcaggcacaggctaaacaggctaagtatatttatgtgaagtgggaaaaaaactcagtagtgaagcagatgtcaacataacctccctcaatggggagggctaagagatgaggatagggccatcagaagctggggaaagccagcccagtgtacacgtgtgtggccaaacgttcctaaccccacccctgctttgtggtcacatgccacccctcaccaggatactcctgggatgaaactatgaagttgcttttgtccctataatatcataattatttaatatcataatttctctttatagttatgaacaccatatagtcatttatcatttcatgagtccatgcatcaatgacccctgtaagaaaaatgccctcattgtataatgctaagttgtccaaaacgatgtctgatgctttggcaatttcacaggctgtatttatgtgtgtttagtaactgcctataacattaaggcaccttttctgtccgctcctattgtttatattcacacatgccaaactgtgagttgtttttttttttctgctctgctatcattttgatttctaacaatattggtgttggttattggaccttccttccatgaagcccagtgagctgcttctgacagaggtaccaagagactacaggggaactaatgggattgtcctcagtgacatcagttttaccagctggggactttgtttgaatgccctggatttactcactgaccactctggaaatgcaatctattgattgataaccctccttgaacttatctgtaaaaccattcatgaaatattttatgtttccataggctggcaagttctcatttttgtgtgttagattttcatggtgaccctctggctctataattcttttatttgaaaaaacacaaccatgtttactctgtcattactcttcaagctttttcgtatttcattttcccttccttttagaaggagtgttttcacactgtagcttttctcatttctttatgcaatcaccctgagagatcgaaagttattaagcataataacctatattgtgtcaaattgtgggtacatccaaagtgcagccatgcgtgggtgttaataggaaattccaaagggttcataaaaatatcttcagaagtttaatacattcagaatatatccaattagcattagtggatttctaatttcacttgacacattcatcataatgaattttgcttttgaagtagtgttctgtttaaactggcgctctggtctatggtagtgtttttttttttttttttaaaaaacaggcttactttcaacatccatttacaaacatttgttgaaaaatattttaggagtatttgtttaaacattattccgaatttactgctccataaagcctagtgaatatttaaattcttgaatatgttgccagaaaaagaagcagagatccaaaaacaagtatatgaccagagttagagctgaaataatagcttgttgaagaagagaaaattgtaataaattgctttatcaaacttgctttcaaaacctgttttttaagttgggcacagtggctcacgcctgtaatcccagcactttgagaggccaaggtgggtagatcacgtgagctcaggagttcaagaccagcttgggcaacatagcaagacttcatctcaaaaataaaatagcgttaaaaaaaaaaaaagaaaaaacaaacctattttttgaacattaatttcagtgctcatgctagatttcagcaggctttggtactcataattctttttagagaaggatttttaactgtttaaaagcaattgattccagttattgatctcttttctagacctgtgcacaatttggatttaataatctgtcttatgtaaattaaatgtggtggttttttttgttttgttttgtttttgtttttgtttttgttttttttgaggtgggatcttcctgtattgcccaggctggacttgaactgggctcatgtgatcctgcctcattctcccaagtagacaggattataggcacaggccactgtacctggctctaaatgtacacttttataactgctagtttggagtttttctctcattgagagattgctttgtaatgcttccaatgttaagaatttttttgtacttttcttatcctagtctcttatgaaagaaagatatagtaactacttcatcaattttcatttttattactgactttcacatatcaagattcagaagttctttaaatatttaaacacgtattcttgtttagtccatatactacctcttttctgtcatttgaactctctctgcctcctaatatataggttatacagctgccttaaattagtgtaaagtaatacggtttcagtttttttcttgccacatcttgtgcattctttcctctgttttccttttgactttaaatggaaagagagcaggcgtatgcgccagcagcattctatgcctgtgactcctgagtagccttttccctctcctttttcctcttgtgtctggcctgtgaatacagctgactgtatacagggttactgttggggttattgtggggcagtgtaaggtgatgaagatctcactgacttagtgttgatggcttgagtttgagtcctggtattaccactcgtttgttgataatcttaggtaaataaactggcattgctaagccccagaaaaatgtatttagtggaacagatgaaatatgattcagtggttaggaagttaacttctgaagacagacaaacctaagtttgaatcatggttcaccccttagtggctttgtggccttgggcaagtttctttaattttcttatctatactgtgaacagtacttacatcataggtttggtctgaagattctgtgagataatgcatatcaagtggttagcactttgccaggcacattgttaagtgcccaataaatgtgggccaaatgtgatagctcacccctgtaatgccagagctttgggaggatcctttgagatcaccctgggcaatatagcaaaatcccatctcta

SEQ ID NO: 9 - DNA, 7286 bp, Homo sapiens
  source 1..7286: mol_type = genomic DNA
tctcacatactgtatagggagtgaaatgattgtttagaactgctggtcattacagaatgttcctcacataacaaaggaacttcaggatttgtctccaagtccatgtttatggtcaggataaaccagaagaacattaaaccgttcaggagatgtgcggcggcacagcgaacaccacaaaccagccagagagctggcaagactctgccagatgtgtgagtgatgctgttcctggtgctgggaggatttacagggcgcttttatgcacaaagattaaaaaacacaccggagtagacaggagcactgaccacacggaactcgacaacagttggtcatgttcggagtttgacctgaatgagattcgcctgatagtttaccaggactgtgacaggagaggcagacaagtcttgtttgactctaaagctgttcaaaagattgaggaggtgacagctcagaaaacagaggatgttcctattaaaatatcagccaagtgctgccagggaagcagcagtgtcagcagcagtagcagcagcagcatctcttcccacagttcttctgggggatcttcacatcatgctaaggaacagcttccaaagtaccagtacacaagaccagcttccgatgtcaacatgttaggggaaatgatgtttggctcagttgccatgagttacaaaggctccaccttaaagatacactacatacgttctcctccacaactgatgattagtaaagtcttctctgctagaatgggcagcttctgtggaagtacaaataacttgcaagacagctttgagtacatcaaccaagatcctaatttgggaaaactgaacacaaatcaaaatagtttgggtccttgtcgtactggaagtaacctaggtctgctgcaagcatgcagcagcaaactgctgcagggggtagctgaaggaggacctctccggctcacccggagtgcttctttctttgcagcacacagcacaccagttgatatgccaagcagaggacagaatgaagacagggacagtggcattgctcgatcagcctcactaagcagtcttttgatcacacctttcccatctccaagctcctctacatcttcttccagcagttaccagcgccgctggcttcgaagtcagacaacaagtttggaaaatggcatcatcccaagaaggtcaactgatgagacattcagcttggctgaagaaacctgtagctctaatccagctatggttaggaggaagaaaattgccataagcatcatcttttccctatgtgagaaagaagaagcacaaaggaatttccaggacttcttcttttctcattttcccctgtttgaatctcacatgaacaggctgaagagtgcaattgaaaaggctatgatctcctgtaggaaaatagcagaatcaagtctccgagtccagttttatgtcagccgtttgatggaagctctgggagaattcagaggaactatctggaacttatattctgttccaaggatagctgaacctgtatggcttactatgatgtccggcactttggaaaaaaaccagctctgccagcgctttctcaaggagtttacacttctgatagaacagataaataaaaaccagttttttgctgccttactgactgcggtgttaacctaccacctggcctgggtcccaactgtcatgcctgtggatcaccctcccatcaaagccttctcagagaaacgtacctcccagtcagtgaacatgctggccaaaacacatccgtataatcctctttgggcacagctgggtgatctttacggagccataggctctccagtgagactgactcgcaccgtagtggtagggaagcagaaggacttagtccagcgaatactttatgtcctgacctactttctccgttgctctgagctacaagagaaccagctgacctggagtggcaatcatggtgaaggtgaccaagttttaaatgggagcaagatcataacagccttggagaaaggagaggtggaggagtctgagtatgtggtcattacggtgaggaacgagcccgctcttgtaccccccatcctaccaccaacagcagcagagagacacaacccctggccgacagggtttcctgagtgcccagagggcactgacagtagagacctgggtcttaaacctgacaaagaagctaacaggaggccagagcagggttctgaggcttgcagcgcagggtgcctggggccagcatcagacgcttcctggaaacctcagaatgcattttgtggggatgagaaaaataaagaggcaccgcaagatggctcttcaagacttcccagctgtgaagttttgggggcaggaatgaagatggaccagcaagctgtctgtgagctgttgaaagtggagatgcctacaagactgccagaccggtcagtggcctggccttgccctgacagacatctccgggagaaaccttccttagaaaaggtcactttccagattggaagctttgcatctccagagtctgactttgaaagccgcatgaaaaaaatggaggaacgggtgaaggcctgtggcccctccttggaggccagtgaggctgctgatgtggctcaggacccgcaggtttctaggagcccttttaaacctggctttcaggagaatgtttgctgtcctcagaatcggctttcagagggggatgaaggcgagtctgacaagggttttgcagaggacagaggcagcagaaacgacatggcagcagatattgctgggcagctcagccacgctgctgacttgggcacagcctcccacggtgcaggaggaacgggagggaggaggctggaggccactagaggtttgtatgtgaaggctgcggaaggacctgtgctggagcctgttgcccccaggtgtgtccagcggggccctggcctcgtggctggtgcgaatatcccctgtggggatgacaacaagaaggccaacttcaggactgaaggagacattccccgaaatgaaagctcagatagcgccctgggagacagtgacgacgaagcctgcgcttcagccatgctagatctgggtcacggtggtgacaggactggagggtccttggaagtggagctgcctctgccaaggtctcagagcatcagcacccagaatgtaaggaactttggccgctcacttctggcgggctactgccccacatacatgcctgatcttgtgcttcatgggaccggcagtgatgagaagctgaagcagtgcctggtggccgaccttgtccacacagtccatgcatttaacactcccaggaaatggacccatccttagaggctacaaattaaccaggctgatcctgttgattcaacaagctgtaatagcaaagaaaactcaataatcttctaaagatttataaaacaagcatccagtcctggatgagccaatagctgaagctgtctgtattatcgcagacacggataaatggagtgtgcaggtagctacaagtcagaggaaagtgacggacaacatgaaactaggccaggatgtcctggtctctagtcaggtgtccagtttgcttcagtccattttacagctctataagcttcacctccctgctgatttttgcatcatgcatcttgaagatagactacaggagatgtaccttaaaagtaaaatgctatctgaatatctccggggacacacacgagtccatgtgaaagaattaggtgtcgtactggggattgaatccaacgacctgcctctgttgactgctattgccagtactcattctccttatgtggctcaaatactcttataagctaaagctcaggacagttcttccttggaagaaaaaaatcaaattctcaactgaaggagaaaggaataagctctctgtgatgtcaaaagcatgagaagagcaaacagaaacagtcattccacctttttgttttgtgtttttgctgtcaagctgatgcttcattgaagacttaggtttacttgacataatagcatttgtgattgtcgtgaacactttaggccatttgttacccatgaatcaacaaagaaactgacctttttggtaggaggaaacataagcactaaacactaagctgttgcaacagattgccttgtgctgtttgggcagaataaagacaagtgacttgagcggggtggtcagcagtgtacataatattccagtaggaaactgcttccaagtttaagcatgagctccccaaactggagaaaacatattttgctattctgagacaacaatcagaatacagactttggattccaggtcacagtttgctttttagacaaggtaaagcaaagaaagccacattgtgccatcttcagctccagtggctttagcagtgactgtttgacataaaacatgtaagaattgcttgttgggaagagtgctttagggacccactgttttcatttcttcttggagtttaccttgtttcagatgcagccatgggtaggtcagagatggattgttggtgcaataaacccaagaatcaatgtagcctcttaatcccatcaagatgtagtttgtagcagcaaagtgtacagtctgaaaccgtatgttttatccttatattttagagctttcagcagcctttttaagagaggccacttaccaaagttatttctataagctcaagagtgtttcggttggtaagttcttccagctgaagccactttttccttatagttaatacaaatgactatttttactttaaaaggcacagctgtcctggtgggaaatgaaacctgcagcagttcaggatgactaatgaaagcaattagcttgaacatttagaaaaaattcatatatgatctaaatttttatattatcatttctgtgccttctaattcctgcatccttttcaaaacatctttccagacattaacttacacattgtataaaaccgaccaaaatgatttcctaaagttcatgcaaaaaaaaaaaaaaaacaacctaattttctgttaatataaaagaaacttcagtttactgaccgtgaaacagactatgtactgacatccagggtaaagtaaaagacttttaaatattggtcattaaaggacaggagctaagctagcaaagcaaaacatctttagcactttgcagatctcaagcagttaaccaggctctgattcccttccactgttttatgaattaattccagttcttttcatgtatctttgaacctaagattatgaagtaatttccctattagggactagaatgacttcagttttttcatttgataaaaatcagaactgctacctttcccttttttaatgatgcaaaatgtagatgagtgcattaagttttgtaagatctttatcattttatgtcattcattgaaaattgaaatgttcattctttttaatgttttcctatttccttttgcctagcatttgactttggtgttttaagttctgtagttccatgacatcattgtttgctgttgtgttacagagagagaaggaacctcacctgtggctcagctcaccccacatccgtttctcattacgtgtaaataaactgtcagagctgatgttacagcttttacagtttaaagcattcccctcgtctctagttccttttttcttgtttacatgttttgggcactttccctcattcaccaccttccagggtttcatagaaaataacttgttacaaaatcagttcaattctaatgtggacatagtggcatgttcataattagacccatataggggacactgagctttaaatcgttgattctaaactctatacattaaaaaaattcagcccaggcccctcaaagcctgagaaaatttaatttgctcttaatttaatgttccaaaactcactcttggaaaaatgcctgttggaaaactacaggtgggtcacatgtgggggctgtctccgtgacactcaggattccagtcagaacctaatcctcatatctattgcctacaaaaatagaccaagaatgttgctgctcttttataatcctttaaatatttaacattcaagttttctttgtcttaaattcagcctcttcctaaaagcaaaaaagaaaaaaaaaacctcacagaattgtgttgagatccaccgctcacacgccgtacaccacccagtggcttcattctggcttagccgcagaggcaagaaagggaccccacttgctcccatgcccacctcaagaaaaaacataaaacaattttttttaaaaaagaaaagaaatctacctcagttgacaggattccacctttagggtttcttcaacttttaagtcttacctgttgagtgtaacttttgtagcatcttgcttttccaagcaagctagtgaggcatgacagagcagaagtctgtaaatgtccctgtgatggacctctttctagcatgttgcagttttatttttaataaattggtaagtgaaatgaatgtaaaggtaattgtgtacgttttagacatgacaatgaaaatttaaaatgtagcttccatacttgtgcataattccaaagtattttattttttatcaatcagtgttaaatagctttttgtacaggcttcaatccatttttcgaagtgtgctgttttttaatgaaagtaactataatcttttcacatcccatggaactgccgtttacacattgcaactttttaaacttaaccatatttttcaaaattaacgtttttggagggagaaaaatccccgcttgctaaatgatactaaaccgttgtttgggctcttataattaggtcctgagattttataaaaatttagtctgtagctttttaggttcttcactagagttggttgtacataaaaataataaagaatataaagtatcccaaaattcttttaaagtctggatttttccgctaatatgtactttagagaatattttgttcatgcatacttccacgttaaattgaaaatgtcttcagcttctcttggtaaatgtgaaccatttgttttttattgtgcttgggggagagggtattttaatataatttttgcctaaatcaagaagtcccctctgaatgttaatttttaaatgtcaaaatatgatgaacgatatatcttgaaagtgagattgcaatatgcttaaacttaagtggtatttcaaaaacgagaaaattctggaatttgtcatttgaagctccataagagaaattgataggacttcgtttttgatcagtctgaatagataccaatgtcattgtgtgggaattttttttaacttgtttatgtattattttgatccatttttctgtggcatttggtgcaataaaacttttgaatttatcttgaa

SEQ ID NO: 10 - DNA, 4921 bp, Homo sapiens
  source 1..4921: mol_type = genomic DNA
tctcacatactgtatagggagtgaaatgattgtttagaactgctggtcattacagaatgttcctcacataacaaaggaacttcaggatttgtctccaagtccatgtttatggtcaggataaaccagaagaacattaaaccgttcaggagatgtgcggcggcacagcgaacaccacaaaccagccagagagctggcaagactctgccagatgtgtgagtgatgctgttcctggtgctgggaggatttacagggcgcttttatgcacaaagattaaaaaacacaccggagtagacaggagcactgaccacacggaactcgacaacagttggtcatgttcggagtttgacctgaatgagattcgcctgatagtttaccaggactgtgacaggagaggcagacaagtcttgtttgactctaaagctgttcaaaagattgaggaggtgacagctcagaaaacagaggatgttcctattaaaatatcagccaagtgctgccagggaagcagcagtgtcagcagcagtagcagcagcagcatctcttcccacagttcttctgggggatcttcacatcatgctaaggaacagcttccaaagtaccagtacacaagaccagcttccgatgtcaacatgttaggggaaatgatgtttggctcagttgccatgagttacaaaggctccaccttaaagatacactacatacgttctcctccacaactgatgattagtaaagtcttctctgctagaatgggcagcttctgtggaagtacaaataacttgcaagacagctttgagtacatcaaccaagatcctaatttgggaaaactgaacacaaatcaaaatagtttgggtccttgtcgtactggaagtaacctaggtctgctgcaagcatgcagcagcaaactgctgcagggggtagctgaaggaggacctctccggctcacccggagtgcttctttctttgcagcacacagcacaccagttgatatgccaagcagaggacagaatgaagacagggacagtggcattgctcgatcagcctcactaagcagtcttttgatcacacctttcccatctccaagctcctctacatcttcttccagcagttaccagcgccgctggcttcgaagtcagacaacaagtttggaaaatggcatcatcccaagaaggtcaactgatgagacattcagcttggctgaagaaacctgtagctctaatccagctatggttaggaggaagaaaattgccataagcatcatcttttccctatgtgagaaagaagaagcacaaaggaatttccaggacttcttcttttctcattttcccctgtttgaatctcacatgaacaggctgaagagtgcaattgaaaaggctatgatctcctgtaggaaaatagcagaatcaagtctccgagtccagttttatgtcagccgtttgatggaagctctgggagaattcagaggaactatctggaacttatattctgttccaaggatagctgaacctgtatggcttactatgatgtccggcactttggaaaaaaaccagctctgccagcgctttctcaaggagtttacacttctgatagaacagataaataaaaaccagttttttgctgccttactgactgcggtgttaacctaccacctggcctgggtcccaactgtcatgcctgtggatcaccctcccatcaaagccttctcagagaaacgtacctcccagtcagtgaacatgctggccaaaacacatccgtataatcctctttgggcacagctgggtgatctttacggagccataggctctccagtgagactgactcgcaccgtagtggtagggaagcagaaggacttagtccagcgaatactttatgtcctgacctactttctccgttgctctgagctacaagagaaccagctgacctggagtggcaatcatggtgaaggtgaccaagttttaaatgggagcaagatcataacagccttggagaaaggagaggtggaggagtctgagtatgtggtcattacggtgaggaacgagcccgctcttgtaccccccatcctaccaccaacagcagcagagagacacaacccctggccgacagggtttcctgagtgcccagagggcactgacagtagagacctgggtcttaaacctgacaaagaagctaacaggaggccagagcagggttctgaggcttgcagcgcagggtgcctggggccagcatcagacgcttcctggaaacctcagaatgcattttgtggggatgagaaaaataaagaggcaccgcaagatggctcttcaagacttcccagctgtgaagttttgggggcaggaatgaagatggaccagcaagctgtctgtgagctgttgaaagtggagatgcctacaagactgccagaccggtcagtggcctggccttgccctgacagacatctccgggagaaaccttccttagaaaaggtcactttccagattggaagctttgcatctccagagtctgactttgaaagccgcatgaaaaaaatggaggaacgggtgaaggcctgtggcccctccttggaggccagtgaggctgctgatgtggctcaggacccgcaggtttctaggagcccttttaaacctggctttcaggagaatgtttgctgtcctcagaatcggctttcagagggggatgaaggcgagtctgacaagggttttgcagaggacagaggcagcagaaacgacatggcagcagatattgctgggcagctcagccacgctgctgacttgggcacagcctcccacggtgcaggaggaacgggagggaggaggctggaggccactagaggtttgtatgtgaaggctgcggaaggacctgtgctggagcctgttgcccccaggtgtgtccagcggggccctggcctcgtggctggtgcgaatatcccctgtggggatgacaacaagaaggccaacttcaggactgaaggagacattccccgaaatgaaagctcagatagcgccctgggagacagtgacgacgaagcctgcgcttcagccatgctagatctgggtcacggtggtgacaggactggagggtccttggaagtggagctgcctctgccaaggtctcagagcatcagcacccagaatgtaaggaactttggccgctcacttctggcgggctactgccccacatacatgcctgatcttgtgcttcatgggaccggcagtgatgagaagctgaagcagtgcctggtggccgaccttgtccacacagtccattaaaactgctgtcaggaatgtctactcaacatgggatctaattaaagagcttctgcatggcaaaagaaactaccatcagagtgaacaggcaacctacagaatgggagaaaatttttgcaatctacccatctgacaaagggctaatatccaaatctacaaagaacttaaacagatttacaagaaaaaagctaacaaccccatcaaaaagtgggcaaaggatatgaacagacacttcacaaaagaagacatttatgcagccaacagacacatgaaaaaatgctcaccatcactggccatcagagaaatgcaaatcaaaactacagtgagataccatctcacaccagttagaatggcaataattaaaaagtcaggaaacaacaggtgctggagaggatgtggagaaataggaacacttttacactgttggtgggactgtaaactagttcaaccattgtggaagacagtgtggcgattcctcaaggatctagaactagaaataccatttgacccagccatcgcattactgggcatatacccaaaggattataaatcatgctgctataaagacacatgcacacgtatgtttattgtggcactattcacaatagcaaagacttggaaccaacccaaatgcccatcaataatagactggattaagaaaatgtggcacatatacactacggaatacaatgcagccataaaaaatgatgagttcatgtcctttgtagggacatggatgaagctggaaaccatcattctcagcaaactatcgcaaggacagaaaaccaaacaccgcatgctcactcataggtgggaattgaacaatgagaacacatggacacaggagggggagcatcacacactgggacctgtggtggagtggggggagtggggagggatagcattaggagatatacctaatgtaaatgacgagttaatgggtgcagcacaccgacatggcacatgtatacatatgtaacaaacctgcacgttgtgcacatgtaccttagaacttaaagtataataataataaaaaaaattctagctgactttatatattggaggagatggtttaagaataatgagtgataaccagatttcttttctctggatggatttgagactgaaggggttttttggtttgtttttatttttttaaaaactggtctacaattcacacacctctgcagtccttttagtggctctcagtcatcctagtggggtgtgttggccaaggacgaccttgtatggtctgaatcttcagttccaaggctatggaggatgcagttatataggtgggtcttctcctctgaggaggcagaggaataccaaaggggatctgaggacctttaagagtagtgctgagaaggtgactgtcatcacattcatcatgagctctttgcatgactgactaaaggcctttcttacagctacataaaagctaatattaagtcatggtgctgtaacataaggagaattattgtggaaaggtattttgtcatgtagcatcctcttattaaagtacagtttaataaatgtattaaacttaccagaattatataaaatgaataacaaatgggagttcaaatgaagccaaagactctccctctccctctccgtctccctccacggtctccctctccctctctttccacggtctccct

SEQ ID NO: 11 - DNA, 160001 bp, Homo sapiens
  source 1..160001: mol_type = genomic DNA
agtcttggaacattgaaactcagtattttggttgttgacaaattctcaaagagatataaattctgcctattactttttcttttctaaatatcttcagacccttatttagagcataaactctagctgcaaatcagtgggagttggtagccacttaaagaaaataaaatttaatttgtatacctaattaaatgaaattctcaaaaagtatttgttttttgagatagggcccccctctgttgcccaggctgaagtacaagtggcactcactgcagcgttgacttcccacactcaagctaccctcccacctcagccacccgagtgggaccacaggtgtgcgccgtgaccacacctggctaatttttgtttgtttttgagacggtgtctcgctcttgttgcccgggctggagtgcaatggcacaatctcggctcactgcaacctctgcctcctgggttcaagcaattctcctgtcccagcctcccaggtagttgggattacaggcattcgccgccaccacgccggctaattttttggagacggggtttcaccatgctggtcaggctggtcttgaactcgtgacctcaggtgatccactcgcctcggcctcccaaagtgctgggataacaggcgtgagccacagcgcccggccacacctggctaattaaaattttttttttttttttttttttgtagagacagggtcttactgttgcccaagctggtttcgaactacagagctaaagcgatctgcctgcctcggccttgcagtgttgcgattacagacgtgagctaccacgcctgcccaaagtatttttatccagccttccaaccatatacaagttatttcctaaatttctctgaggattacatcccattgtacgagcttcctcatcctggagggggagtgagtgaatggatggggttgctgaaaatttataagattagtttgatacaaactctgatatattttggttccatgggttaaataagactgtgaggtcacatgtgagcaatgtttttctttttttagaaagcgtttcttccctgtaacttgactaaaattccacagttcctcccgtcttcatacctaaacattaagatagatttattaaaaatctaaataattagcgtaaagggttagatatctgtacatatatgtctttaggcttcctgacttcgttggtttcacctgattttgttggttaacaaggaaacagcctaactcctgagcctccaatcgctagctcttccaagagactaattcccggtgtcagggttctaggcgctagtacaaactgcccgcagtgcctgctcgaggtcgtctttgcggggagccatggctgtggcaggggtcccggcagtttccttcaccagtccctgtgagccagcccccgcgctgtccagatcccagacctctcgcgggccggcgcagccttctaagggcggtcctggggtcctgggctcaaagtccagccttggccgcggccccacgggtacgcttgtgggccttccgtgctccaggagccgccagactctgcccggcgcggaatggaggtgtgaagccgcagaagctagggaggggctgacaaggaagagtcggttgcccgtggttccctacgcaactctgtgggtgcggggagtcgaagccttctgcactccaaggctcctggcatcgtccccgcgccaccccggcgtaccctctgatggtcgctgacagcttcacaggggaagatcgagactgacccttctcccgctacacatccctagccaccttccagtcctgtcctctcggctcacgccccgcccctgccacgtgacgggacccgccagtgagcctatgggaggcagctccgccccacgcccccaccttgccccttgctccgcgcgccgccacgtgatgcggcccccctccagccaatgagtgccggccttgcctcgcgccccgccccgcgcgccgtggccgtttgaagtgactaatttctgtcatatgactgaggcgcccatgggggtggcggggcggctgtaggagcaggggcctagcaagcgcccagcggagcgacccctgcctggccgtggctagcatggcccctacgctgttccagaagctcttcagcaagaggaccgggctgggcgcgcccggccgcgacgcccgggacccagattgcgggttcaggtagggcgctgtggggcgggggtcgcggagccgatggccttgtgggctccgggctccaggggtgttggggccttcggtgttccgacccgagcggaagcgccgcgccgagagcagcatctggtcctcggtggggtggagccggctgcgggctagcgccgaagggttggagcgaggtcctaccttttattttaccccacccgcctcgccgttgccccttccccctcctcccgtcggtttgtttacgacctgcccccagccacgcgcgactctgctcctccggacctagcaccgcggcctgagactttgggtccacacgccttcctggcaccgagtagagttgggcgcgggctggattggacctcagccgccgtactccgggccgcgaagttctcccctcctccccgtgaccagttgtcctccgggcgctgcgttccagctccgttggcgttgtggagagagcggcacgtttggccaagcttctgagttgagagaaggctggaggagcgagtaggcaacgtgccgttctttcaggtttcttggacgctaaaattggaggtgtgcagtaaccggaccgagcgaccttaatgttatcgaaggagaaatgtgaaacttgagtttagggttactgccgaaggaagaccaaattgaatgaaatctggccttggaattggctgtagattcttcctcctcgaattgttactgaaaaggagtcttaaaaattgaaaatgttagtagagcattttgtagtgttacaggctttgttaatttttcattgtagtacctgttgctggcagagtaacttttcagaattgtaagatttgatataaacctgaattcaaggtaaaatttagtcgttaaactgcacctgaggagattatgtccaaacagcctttatacgtattgcagtgtggaaacttgcaaatataactaggctaaatgtcaaatgccacacgttttaaacttggtaggatagcaaagagcccagttgtacaacaatagtagaaacaaaaaaataaaataaaaataaaaaaagagaatctgtcaaattttggaacaggcgaagttgccacactggtttaagaaattttgctattcttaaaattattcactctctcttgctaatgcaggtctcatcaggaaaaattcagtaaatgcatatggaattgaagaggtttttctacgtatctgtcttttcccctgaaaaataaatgtgtcatgctcatctgtctctctttaaacatttctttagtgtttttcctttgaaaaatgaaagtgcaggttagataatactacattgagccatctagtaactcaagcgacaataggaaacaggttccgataggatatttaaaaggtggcatttgaatagacaactgctttctatttctggacaaagattgactttgggtacgtaggtttacaaggctctcaagtcactcatatgaaaaaacattttcacgtctggttttcaaaaatgtaaagtctactacatagttgcgtaatactattttacagttaccaaagaactttctcatcagttatcttatttgatgtttcacagcaatcttacgagatagagcaagtagcagtgcagataactatatacttttgccagtggaagtaagaattatctgtaagcccaataactgcagtacattatggaatctctcactttaaaaataaaacttgtgcatgtgagaaatgaaaactgatgaaacagaataggcatatctgaaggaaaaaaaaccattctggttaatgtcacatagctaataacttacagatctaatcaacccagggttttttaaaaactatttcattgagctataatttatacacaataaagtataaatacattttaagcatacatcgtatacagttgtgtacccaccacccccatgaagttttagaacacttccatcacccaaaaagttccctcatgctctgttgtagcctaactcctcctcacccgtggcagtcactgatactttctgtcatagtcttgtgtctgtcttgtttgttgcatttattagttcctttttttctcactctgtcaacaggctgtagtacagtggcgtgaccacgcttaatacactgtcaacctcctgggctcaagggatcctctcaccttggcctcccaaagttctgggcttacagggatgagccaccacacccagccagttccttcaattttatcactgaatggtattccattgtatggctataccatgatttgtttattcagccactagttggaggacatattttttccccagatttgggctattatgaataatgctgctgttaatgtttgtgtataaatctttatgtggacatatattttcttttctcttggatagaaatctaggagtggggttgcagagtcatgtgctaaatgttgtgtttaactttaaaaaaaaattgtcagacttttccaaaatagttgtaccattttgtattctcagtagcaatgcatgaaggttacaggttcttcacaatctcttcaatattgatattgttatttttgttcttttttaattaaaaatttttattgtaaaaaaaatatgaaatttactttttttttttttttttttttttttagatggagtctcacttgttgctcaggctagagtgccatgatacaatcaaggctcattgcagccttgacctcctgggctctagtaatcctctcacctcagcctcctgagtaggctcctaagtatcctcccaccttggcctcccaaagtgctgtaattacaggcatgagccaccatgcctggccaaaatttactgtcttaatcgtttttttattcttttgattatagccattctagtggtatcttgtggttttaatttgcatttcccgaagatcatattcagcatctttttatataacccaggtttttgagtagactaacattttgttttcattctagtataccatgctttcattgctggaatccttttttgggtgttttgttttgttctagtcagcctaaattgttaaatcaggcttgggtgtagttagccattggcaactaactgtagctcagtccctaagaggcagttcctagagtaaccaatatacaaagctcagtaattgtaagccacagcaggactttagaataggagagacttccgataaagaagctttaggaacctttctgtattgtcttttatggttaccccattggaagagatggccaggaaatacccccttcccttgtcttcactctaaggtctcttaccatatcgatttctatgtgcttatctaagattcttgagctggagatgagtttgaaaaatattatggggagtgtattttttcagtcatttatagaattgagacagtaatttgttttctccatttcaagaatttgggagaaaaggctgtttctagtagaaaatattgctttatgttctctccattttcttccagtggaagtaaaaagtataagcccaataactatagtacatataaaagtgattattttgggctgggtttggtggcttatacttgtaatcccagcactttgggaggcccatggcgggaggagtgcttgagcccaggagttcaagaccagccagggcaacatggcaaaacccctgtctctacaaaaaatataaaaaattagccatgtgtggcagcatgcacctgtagtcctagctactcaggatgctgaggtgggaggttgcttagcctgggaggttaaggctgcagtgatgagccatgattgcgccactgcactagtctagcctgggcaacagagtgaaatcctgtctcaaaaaaaaagattgttttaaataaaattcctgaaaactaatttggcaaagaaggttgttttgaagtgaaatgtttgtagggcataattaatgttttgttaaataatgtctggatttttgttatacaggttgagtatcctttacctgaaatgcctggttctagaagtgttttggattgtggaattttttggatttttgaatacttgcatatgcataatgtgttttttcagaggtgggacctaagtctaaacataaaattcatttttatttcatacataccttgtacacataatagcacataatttatacagtactttttaatgattttgtgcacaaagtgtcgactgcattttgactcctcacatgaagtcagatgtgaagttttccactgtggcgtcttgtcagtgatcaaaaaaattttggactagagatgctcatcctgtatcccaaatatatgaacatttattctgattctttatatcagggattcttaaggtactcagccttttaactggtctttctgtgatcactcttgcctttttccaaactaccctcaatatgtcactttttaaaaagtgccaattgtggctgggcacggtggctcatgcctgtaatcccagcactttgggaggccgaggcaggtggatcacctgaggtcaggagttccagaccagcctggccaatgtggtgaaaccccatctctactaaaaatgcaagaatcagctgggtgtggtggcgggcgcctgtaatcccagctactcaggaggctgaggcaggagaatcgcttgaacccgggaggcggaggttgcagtgagctgagatcgcgccattgcactccaccctgggcaacaagagtgaaactccgtctcaaaaaaaaaaaaaaaaagtgccagttatcatcatgaacagcagacaaaatgagacaaaatgatgtatagaatttaatatcttcataacaggtttattttaaggattcagagataagtcatgtaaagaacttaatgtggtgcttagcacatggctttcaggaaccagaagtagttgttactgttatatcagttttgtgtaaaaaccacttagtttgggcccagactcattaaaggatggcttttgcccattctacatagtatggcttttgctaatttgctagccttgactttttttttttctttccataatgacattttttaaaaaagccactatagtattattgttaatagaattaacagaaattccttaataaaagccattcttagtccatattccaatttggtgtcatctcaatatgtctttttatggtagttttgtttgaatcagtcttaagagtctgtatattgcatttgcagttaggcagcttaagtaaattttattctataacagccctcccccacttaaatgtgaaattccccacattctgtgtttggcttttccagtcttatggtttcccagcaatatgtggtttaaaaagcccctccaggcaattctgatgctcaggtttgctgtaagtttgctataacctatttctctgtttcttgtctttcctgaaaacttgaagttcgatttagatattttatcatatttacattccctttttttcaataaaattattttgtagatgttgtgtacttcctattcatcaaagttacctacctggttgccccacttgtagtgatttcaggtggtatcagccttattcttctattacataatttgccctttaactaatgattttagcattctttgttgatcattgcctgaattcattattttgttagagtttgcaaaatggtgatatcctgattctctaattttttatgcatttatttgctggaataacttttatcaactatttggttactccttgctacagaaaagggagcataaaaggtgatttccctttgtcattttccaaagtaattggtaatgagctgttcactgcaggttttttgttttaattatcatcttaaaagattatcatgagctattggattttagtgtgttttaatccactcctgtcaaattgtctcatatttggccaatggaagcctttttaggttgacttctgtttctttttgacatgacctcattaatctttgataacttcttgctttcttctggcctatgtcttaatctacactcctccttctaagagtttatcacctttgatttattttagattctgggatgtgccaagctgtactgctccctgttcttgatatagtcccttatacctttttgtttggctttttgtagtgatcatctgggcttattctaattactacttcctccaggaagccttttctgatttcttccagactagagtaggtctgactgtaactttgtttcatagcttattgcatgtccttctgtgacatctgtcatagttgtcattgtccacgtctctcttctttgcttacttgagccttttcttcagtgttaagcatcaagatttattttatagtcagaactctgtaaattcacgtaaggggttgtgtatggggaatagatgcctaggtttttggctggagcaactaagtaggtgccttttttttttttttttttttttttgagacaggttcttgctctatcgcccaggcgggagagcggtggtgcgatcttgggtcactgcaacctccgcctcctgggcttaagccatctccccacctcagcctcccgaatagctgggactgcaaggtgtgggccatcatggctggctaattttttattttttgtagacacggggtttcgccacgttgcccaggccagtatagaggctgatcttaaacacgctatcaaaaatagccaccttctccccattttctgtcagaacacacactttatatccattatagctcttttaataatttattataatttgtctcccccaagttcacattgttgtgccagtggacagcacagtgcctgagcatatgctgaggaaatatttgtagaatgaataaatgaaataacaattttaagggcagagggagagggtcaaaagttctgttttggatatttggtctggttttaattgccattgagatgcccacgtagagatgacagtttaataaagtcagtctggagttcacagtagagattgggattgcagatatgagtttgtgtgtatggttagtattaaaactacagaatggaagagatcatctaggaaaagggtgtagatagagaagtggaaaggacggagggcttcgccctgaggatgtgttaaaatacacagatctgagagaggaagatataccaagaagatagatagggaaaagccagggatgtgtggtgttagggaagccaagaaaagaaagtgtttaaaaaatgatagagtgagtgataaattgtttgtatactggttgctgacaggtctcgtgaaatgagaaacagaaaagtgtccattatattagtcaagatggaggaaattggtgaccttgatggttttttggtagggaggataaatgtttggggggaaaagtgagatagatgtggagtaaatgtgaggaaatggccccactacttaactttctattatttctataggataaatattctgtagtgccgagttattttttcacttgcagtgttctgattttatgtcacattttgagcttctgaagttcttaaaagctagcttcataatattaccaacaattataagaatcatgtttcagaagttttgttttttaaatgggatttttaaaaatttgtcatacccacaagaatttttattttacttaatttattttaaatatatgtatttttaattgattggattatacacgtcccagcctcttgtaaccactattctactctacttctatgagatcaacttttttagtttctaaatgtgagtgaggacatgtggtatttgtctttctgtgcctaatttcacttagcatcatgtcctccaggctcatccatattgccgcagataatagaatttcattctttttaatggctgaataatattccattgtgtatatatacgacattttctttatccattcatctgttgatggacacttaggttgattgcatatcttggctagtgtaaatactgttgccgtaaatatgagtgtgcagatatttctttgacatactaattttctttcttttggatatatattcagtagacagattgctggatcatatggtagtttaatttcacagtaagaagtgcaaatattataattttggttgttaattttatctgctttttcatccctaagtagtggaattagatttgttttttacactgggtttattgaaaaaaagagaaaaatacagctttaaagtgtagtttatgaaacttggatatcacttcttttttttttttttttttttttgagacagagtctgtcacctaggctggagtgcagtggcacaatcccggctcactgcaacctctgcctcccgggttcaagcaattcttatgcctcagcctcccgagtagctgggattacaggcacgtgccaccacgcccaaaaatttttgtatttgtgtttatttatttattttaatttttgtatttttagtagagatgggagtttcaccatgttggccaggctgatctcaaacgcctgacctcaggtgatctgcccttcttggcctcccacagtgctgggattacaggcgtgagctactgcacctggccttggatctcacttcttactaatataataattatcttaaatcctattgattttaaacttgcttaaaataacttcccatgtaaaacataagataacctctttcattttaaaggagtcctaatctactctctcttgattttgtttctgtttctgggaccaccattctcttagtctaccaagttgaaaatcagagatcattgtttattcctcctagtctttgattgccatatttgctcatttgttaagtcctgttgattcagattcttagtagcttcagttctttttcattttccactgtcatcaccttatacaaaccgttgatgcctttcttgaaacttttccattactttcccacttcttgtgtgttctgtgttcccctccacaccatactactacttttttcagcaggaagacagggtctcactgtgtcacccaggcttgagttggagttcagtggcgcaatcctagctcactgcagcctcaaacttcacttcgagcagtggtcccacgttggcctctcaaagtgttgggattacaggtgtgagctgctgcacctggccccacactgttcttctaaattgattttcctagatcataattctaatcaaaacactcagaagtcttgactcctcattaagcaatgaggattgatctgtgctgcacactgttttatgtgctttacacctattaactcatttaattctcacaatagctttataaagaggtctgattatccctgtttcattgatgaggaaacaggcacagagaaattaagtatcttaccccatgtcacgtggctattaagtgatgaaattaagatttgaacttagatgtttaagttctagagcctttgttcttaaccaagttcaaagtcctcagtttggcttatcagccttttatcaagttgtagctggtgtgatggacttgatgagttcagatccatgccccagtactgcggggtgtctgtgtgtatgcttgcatctcttaattctgaaatcagaccacttggttttcaaactcgagttctcacacttaattgctgagtcctcaggcttcattctcttttgtcattaggtaatgctagaagcagtgcctcttgatctgttatctcataccactctgcctaggagacaagactctgtactccaagattttcagcaaaagtcctaaactcggtgctgtttatatcacccttgaacttattcatggtcatcatgacctgattggcttaggcatagactacctattttggttactgtggcaaggggaatggagttgctctgattgtggtagtacatctggagctagtagtgaggtcagtctcccacaaaatgctggctgaagagggggaagtagatactgaagagatagtcccagtatttattatacctaccttctgatagttgttttgaggattaaatggcatagtaggtactcagatgttagaatttcttcccacatcccctgctttagttcagtatgtgctgttataacagaataccagagactgagtaatgtataaagaaaagaaatttataaggctcatagttctggaggctaaaaagtctgagagcatggtgctggcagctggtgatcccgtggaaaaaggcatcacgtgggcaagagaaaatgcgggtgagagcaagggggtgctgaactcacttttataacaaacccactctcgagataatgaccttaattcattcatgagggcagagccctcataacctaatcacctcttaatagtctcacctctcaaaattgttgcattgaggattcagtctctgacatgtgaacttcggggacacattcaaactatagcactctaatcccccaatttctcttttccagccttcattttagtttgtcctctagtggtagcctctaattaggaccatttgatgtttcttgagaataatctgtttcatgtgtttgcaaactgcttggaatactttggatgtgacgtattttacagctccaatagaacccatgtttttcctgtatttcttcattgtggcagatacttgcttgtgttttaattgcatttttatatatctatattaatacttcactagattgtaagttctataagggcacagcctttgtctaacttagtgctgtacttctggtatccagctcaaagaaggcattcaataaatatttgatgaatgaacaaatgaataaaaatagtcactgaactgaaaaagttctaattcatttaacaaagatgcttctgttttgtgttgcttgcctaaagttattcattcaatgagcaatttaagcagatttttctttgacatcattgtttatcaatttaaaggaaaattttatttattttgatttttttaaacattgcaagggtggcctcattttccagaataagtttccagaataagttttggaatcggttatgactcccataaataaggattttgtatgtattttgattaatttctagttactttagaatataaaacacaaactgcacatttgtaaaaaatagacattatttgtgaataatttaaatattaaaaaataaatattttcaaagaaacaaggtctcactttgctgcccaggctgggcttaaactcctgggctcaagctatcttcctgcttcagcctcccaagtagctgagactacaagtgtataccactgcacccggctaatattttaaattttttttaacgaaatgcctgaacattttttaaagattacatagtaaagccccatgttaatgtaccgtctgtgacacgatcagttccaatcatggaactcctgactggctaagtggtgaagctcgttacttgttaatttttttgttttttgttttttttttgagacggagtctctgttgcccaagctggagtgcagtgatgcaatcttggctcactgcaacctccgcctcccgggttcaagtgattctcctgcctcagcctcctgagtagctgggattacaggcgcctgccatcacgcccggccaatttttgtatttttagtagcggcggggtttcaccatgttgggcaggctggtcttgaactcctgacctcaagcagtccacctgcctcaacctcccagagtgctgggattacaggcgtgagccactgtgcccggcctacttgttaaaatctgactcaaaatattatgtgttgaattttgccctgcccaatagcgttatgatatatatatagtcatatatatcatatatatgatatatatatagtcatatatatcatatatatgactatatatatagtcatatatatcatatatatgatatatatatagtcatatatatcatatatatatgtcatatatatcatatatatgatatatatagtcatatatatcatatatatgtcatatatatcatatatatagtcatatatatcatatatatatgatatatatatagttataagaaatttacttatgatagtagttccctgtcccaccgtgcctcaaacccagtcctgatcttagaggcaaactgctttttcaattacttttgctgtttttttttttgaatatttactttaatatttttgtttttattattatttttttgagagacagtctcactctgtcgcccaggctggagtgcagtggcgtggtcatggctcagtgcagcctcgatcatctgggctcaagtgatcttcccaccccagcctcccaagtagctgagaccacaggcaagagctaccatgcccagctaatttttattttttgtagagatgggggggtcttactttgttgcccaggctggtctcgaactcctgggctcaaacagtcctcccattttggcctcccaaagtgctgaaattacaggtgtgagccactacatccagccttcttttatagtttcaaacaaattaaatatactgtttattattgatttatttattatttcctgataattaaagatttaggtctttaacacacacacacatacatacccttctccttcattctttcaatattagaatttttggttgaatgatcaaaattaactatattgttgtatcgtaaatgtctgttcactgatgagctaagtgtattttatgttttctttccttttgaaggtaattgctgaatttttgtgtttcgttttctttgaaatcattagtatttctatatccttcaacggctccataaaacctctaaaagcaatttatctcttagtcaattatctgacagataattgatcagttcatattgtttcctcctggatatgtccttttttggaaccttccagccctctctggctccagtctggactgctggccctgtaggtatgctccctagtgttgtcaggaggcttcctttgtcttgtcttgggaattactttgcccttttgtttttccttctttttttttttttgttgggggcagattacccattgactggcttccatggcttcttcctctttggattattcctgtgtttcagtggaccatatctatccaggagtttcctgagaatgaaagggtgggagataaatttttgagactgcaagtctgaaaatgtctttgttctatctttatgcttggttggcagtctgctaagtacacaattctagattgagattcattttaagtcagtaatttgaaggcattgccctattgtcttgagcttccagtattgcagctgagaagtcaaaagccataactgacccccaagaagctttttgggggttttcttgatttttctctttaccttcattctgaaatttcagtgatgtacctcatgattttgtttatttttgttttttaattcatttgctgatatttgatggggcttttaatctggagacattttagttctaaggaattttcttacatgatttcttagattgcatcacttctttttagaactttagatcctccagggacagtctcccgtattgatctttcaaatttcttgttttttttttttggtctgttttgttttttcctctcctaatttctgacttagttttctattctacttctaggagatttcattttttggggggtgaagtgtctatttttatgtcagttatcatgtttttagtttccaagagctcattcttattccttttcataattctcttttttcagatctgtttttcaacctctttctctgaagtcctaatgaccatgagtctggtatttctttgacagtttctgaagagaatacacctgttctgtgtaaaggatggggttaggaaagggaacttcatagtatataagcatacacaggtgatattgcatgttcaattctaggccagtaaatattgccaaaaagtaagctacacaaattttttggtttcctagtgcatataaaagttacatttacactacgctgtagtctgttaagtgtgtagtagcattatgtcttaaaaaacaatgtgtacctaactttaatctagaaatacttaagaaacggaccaggcgcggtggctcacgcctgtaatcccagcacgtcgggaggccgaggcggacggatcacttgaggtcaggggtttgagactagcctggccaacatggtgaaaccaccacgcctggcctagcctccacttctaattctaattctcttgctatttccaccacatctacagttacttccttcattgaagtgttgaacccctcaaagttattcataatggttgacttcagcttcttccaaactcctgttaatattggtattttcacctcttcccatgaatcatggatattctggaatgatgaatcctttccataaggctttctttccctccctctttgcctccctccctccctcccttccttcctttctctttttctttcttttttatttcttcattgagacagagtctagccctgttgttcaagttgaagtgcagtggcgtaatcttggctcactgtaacctctgcctcgcgggctcaagcctcccacgtcagcctcctgagtagctgagactacaggtactgccacacccggccaatttttgtgcgtgtttggtttttgtttttttgttttttggtagagtcgaggtttcactgcgttgccaaggttggtctcgaactcctgggctcaagagatccccccgtctcagcctcccaaggtgctgggattacaggtgtgagccacagtgcctggcctccagaaggttttcaattttattttcccagatttatcagaagaatcacttatttatggcagctatagccttacagaatgtatttcttttccttctttttatttttctttttttaagagacagagtctccatgtcgcctaggctggaatgcagtggtgtgatcctagcttattgcagccttgaactcctgggcttaagtgatcctcccacctcagctttccaagtgtctagtgctataggtgtttgccacgatgcctggctaatttttttggttttacataaggtcttgctatgttgtggaggctgggcttgaactcctggcctcaagcagtcttcccaccttggccttccaaagtgttgggatttacagtcatgagccaccacacctggccctaaaatgtatttcttttttttttctttttcctaaaatgtatttcttaattagtaagacttgaaagtcagaattactccttgatccgtaggctgcagaatggatgttgtgttagcaggcatgataacattaatctccttgtacatcaccattggagctctttggtgacaagatgcattgttaatgagtagtaatattttgaaaggaatgtttttttctgagcggtaggtctcaacagtgggcttaaaatactcagttaaaccatgctgtcagcagatgtgctgtcatccagactttgttgttcatctatagagaataggcaaagtaaatttagcatcattcttaagggctgtaggattttcggaatggcaaatgagctttggcttcaacttaaagtcactagctgcattagcccctaacaggagagtcagcctgtcctttaaagcttggaagccaggcattgatttctcctgtctggctatggaagtcctagatggcatcttcttctgataataaataggctgttttgtctacactgataatctgttatttagtgtagccagtgtcatcagttatcttcgctagatcttctgggtaatttgcctttttaccttgtaattttatgttaatggagatggcttctttccttaaacctcatgaactaacctatactactttcaaacttctcacctctctcagacttcatagagttgagagagttagggccttgccctggattaggctttggcttaagggactattgtgactggtttgatcttccatccagaccattcatattttgtccctatcagcaataaggctgtttcactttcttaccatttttttattcactggggtagcacttctgatttcctctaagaaattttcctttgcattcacaacatggctaactggtgcaagaggcctgtcttttggcctgtctcagccttcctcactacgcttgatcatttctagcttttgatttacagtgagagatgtgcaactctttctttcactggaacacttagaggccattgtggggttattaattggcctaatttccatatggtatgtctcagggaatagggaggctccaggaaagggggagagatgaggaatggttgatggagcagtcagaacacacacaacacttaccaattaagtttgctgtcttatatgggcacagttcctggtgcccccaaaacaattacaatagtaacatcaaagatcactgatcacagatcaccataataggtcaaataataatgaaaaagtttgaaatatttttagaattaccaaaatgtgacacagagacaaaaagtggcatgttctgttggaaaatggaaccaacacagagttgccaaaaaccttcaatttgtaaaaaaaataaaaataaaaataaaataaaaataaaaaaagtggtatctgcaaagtgcaataaagcggagttcaataaaataagatgcctacatagacttctgttctgtgcctttttcctccattcttgaaggtactttatgcttccagggactttgcttctctgggttctgagatgaatcctgtggttgctcattgacactcccatatgtagacatttaggatgtagttacttgtgtttttgaaaattcatttgctagatttgctagttttcatctttcaaatatttattgaagtctctacatttgatattttcctgtcatattctctttgtcttaaagatacatacatatatttcatttactgtcattttagtgggctttgaatgtgtcagtgtcccttgcttacatggatttcctgaaaaattttaaagcttttattattattattattatttttttgctagagacagggtttcaccatgttgcccaggctggtctcaaaactgctgggctcaagggatccactcaccttggcctcccaaagtactgggattatagacatgagccctgcacccatccctaaagctttttattaaaaaaaatttctaacaaaaatgtaaagagcatgctctaacatctgccattacccagatttcacatttatcaacatttctggttttttgtttcatttttcccccaccttattttaaatattaatactattactgtttttttttggttggtactgtattttaaaacaaattgtagacatcctatcatttctttttcttttcttttttttttttttttgaaacagaatctcactctgttgcccaggctggagtgcagtggtgcgatatcggctcactgcaagctctgcctcccaggttcaagcgattctcctgcctcagcctcctgagtagctgggactacaggcgcacgccgccatgcctggctaatttttgtattttttttttttttaactagaagtggggtttcaccatgttggccaggatggtctcgatctcctgaccttgtgatccacccaccttggtctcccaaagtgctgggattacaggcgtaagccaccatgcccggccacatcttatcatttcatgtatacatccttgaatatgaatcttgaaacaattactaatagatctaaaaatgagcagtgattctttgatatttaatactcagtccatgttcagttttccttgattgtctcagaaatgactttttagagttggatgtttgaaataggatcccagagttcacatacttatttgtctatagaatgttccatattttggatttgggtctgatttctttttctttttttttttttttaattatactttaagttttagggtacatgtgcacattgtgcaggttagttacatatgtatacatgtgccatgctggtgcgctgcacccactaactcgtcatctagcattaggtatatctcccaatgctatccctcccccctcccccctccccaccacagtccccagagtgtgatattccccttcctgtgtccatgtgatctcattgttcaattcccacctatgagtgagaatatgcggtgtttggttttttgttcttgcgatagtttactgagaatgatggtttccaatttcatccatgtccctacaaacgacatgaactcatccttttttatggctgcatagtattccatggtgtatatgtgccacattttcttaatccagtctatcattgttggacatttgggttggttccaagtctttgctattgtgaataatgccgcaataaacatacgtgtgcatgtgtctttatagcagcatgatttatagtcatttgggtatatacccagtaatgggatggctgggtcaaatggtatttctagttctagatccctgaggaatcgccacactgacttccacaatggttgaactagtttacagtcccaccaacagtgtaaaagtgttcctatttctccacatcctctccagcacctgttgtttcctgactttttaatgatcgccattctaactggtgtgagatgatatctcatagtggttttgatttgcctttctctgatggccagtgatgatgagcattttttcatgtgttttttggctgcataaatgtcttctttcttcctcacagtatactttaccttgttcctctgtctacattactttctttaaattgagagttagatctagaggcttgattagattcagagtcaggttttgtttgtttgtttcccaagacaatgtcataggtggtggtatgttgttttttttgtttttgtttttgagaggggggtcttgctttgttgcccaggctaatcttgaactcccaggctcaagcagtcctgcagcctgggccccccaaagtgttgggattacaagcgtgagccaaaaaaacagaaagtaccagaaagcacagaacctcaggttgtcacatttctagtggtgctaagatggatcagtaggtttatggggtgtcaacctgatcctgccattatagggttgcctatcaaccattcacctcatggttttagcatccattggtgatgattacagtaattattatttcagtgatgctcaaactttagcattcatcagaatcacctggaggactagcaaaaacttagaatgttggaccccacccccaggaatttgtatttctaacaagtttttaattagtgctaatgttgttagtgtagggaccacactttgagaaccacaatatgatatcattagtggttgcaaaataatgatttgatagtttgcatttcttctgaaataagttttttcagtaaagatagtatatatgttttatttaccagttttcaaaataatgattcagtgttctagcagctttcaaaggtgaccagtgaactttttttggttgatatttccttttgtttttttagtatttgattcagtctgttgcagtcatgatatgtttttgtgaatcatctttggctggttgggacccttttagatgggcacctattttcttctcacattaccttagtagtttttttcgggcaccgtgtgttattccaagcatgtttttacgacaggaccatttttcccagcgattccagttccttttggtaggaacagcatttagtatcacactgtattctagagatcttcattgtcactggtcatcattatttctaggtgttttcagagtacaaaacagagatacaaaatttctcttgttcaaaaaaaaaagttaactgaaagttccaattcaaattaaattttgttttaatttttaaaatatttcttttatgttgaaaattctgttttctaacagtcttactatagtttattttataacatatatatatatatgtatagtagcttcagaataataatagtgcaccaccgtgccctgctaatatatcttagacaatttttttagtagatacagagtctcgctatgttgcttcgactggtcttgaactcctcagctcaagcgatcctcccacctcatcctcccagagtgctgggattatagacatgagccatgcacccagcctaaagtacaatttattgaagtataacatgtattcagaaaagtgtacggatcgtaaacatacacctcagtacagtttctgaaagtgaacacactttatataatatataataagcacccagatgcacaagcaaaccgttaccagtgtcctggaacctacttcatttgcctttctagttactctccctcatctttgcctggggtaaccactatcctcacttctaacagtataaattagttttgtctgtttaactctgtgtaaatggaattatgttccaattttagtatatgtgatgtggaagcaagcccagtggaatcatattgtaatcacacactactgtgtttggcttgttttcaaggtatttcagatttattcatattgccacatgtagcagttgctgctgtttagtattttgttatgtgaagatacaatttacccagtctattgatggagtattgtttttcagtcaaagggttatttccaatttttgactattaagaatagtgctgctatgaatatttttatatatgtctttcggtggacagatgctgaatactttagctgatagtttctcttcagcatttctgtgtttggaatgtatgttatatgacagttccaaagttacacacattgcattcctaaatatgttgtgtaatacacattgcacatgtgtcagaattatatgtttaaccccaatgtaattgtggatgtagaagatatagataaaactacaccttaccatataaaatatgcagaagtacaccagtgacgtcagttttgctatggttgcagtaagcagtgcagttctacaaatttaccattttaaaagcattttgtcaaactttctggatacaaagatgctgccaaggaactcacagcctaatacatgagttaagatatgaacatagcatacattattttgcattgtgctgaagtcatttaagtaccagaaggaatgtgtgaagtgctatagtagattaaaaatgtggcatatctataaacacagatttaaaaggtaagagaaagtaacttatagcaaaatatttatttgtagcttatgtgtcaggcagaattttaaggactttagatatattaattcatttaatcctcaaaacaactctacagggctgggcaaggtggctcctgcctctaatcccagcactttgggaggctgaggcgggcggatcacctgaggtgaggagtttgagaccagcctggctaacatggtgaaaccccgtctctactaaaaatacaaaaattagccggacgtggtggcggacgcctacaatccaaggtactcaggaggctgaagcaggagaattgcttgaacccggggggcagaggttgcattgagccgagagtgcgccacttcactccagcctggacgaaagagcgaaactccttctcaaaaaaaaaaaaaaaaagtatatataatatgtatatatatatttatatttatattgataaattcaatatggaattattagatgatacatattttatttttaaatgaactgttttattatccttactgttacacttgtgtataaaagatgctttgggattttactttttttcagtaaatatatactgataaatgtttacatgttaatttaaaaagctcagaggaaagattattcaactttctgaaaacatagcatacacaataaataactgtttgccagggggcaaaaaaagctctgttgtcttctagtaccagttggtattacgtaggtttgtttgctgtctcatatcttatttatagaagtttggaactggaaactagatactaaacaaacagtaatgttccactgtagtttatgcattagaatccttctttgatcataagtatttttgcatatgcttccgtgaaactagcaacttcggagaaactggcaacttgcttggatcaaatccatttttatataccttaataccgaagcaatatgtagcacacctaaatgtactgatttgtttagataatatttgtaaaagctttgtaacattactaataagttataaattaatagaagataccatagcagttagagagcatgaggaaacatttatgggtatcatatgtctgactttagaagctttgcagactccttcctctcaagaaaagagcttctgttgggagaaatttcaaattccatgactgtgtttgttaaaatatttcagatatatactaaatattctggtgctctcagaatttgcaagtatttaaaaatcatactagtggataattttagttgtgtgtttattcttttattggtcttcagcagctgtctaaccttgctttcctccttgaacatggagaccaaacattgggatgacttcattttaactagaggttacctttattagttagcctgattactcttttataataacagagaacctttgtgaatgaatttttcaaaatcttacagaacgtatgggagggtgtgaaatgaaagataggtgtgtgactttcaaaagttgatctgaaagagctcttaaaaatctaagacttgttcagtgttacttttttagaggtaacataagatgttatatcggatatactgcctttacactatttggaaaataaagactattttggctttgttttaaaaatgcaaaggaggccagacgcagtggctcatgcatgtaatcttagcaatttgggaggccaagatgggaggatggattgaggccaagagttcaagaccagcctaggcaacaaagtgagaactttgtctctacaaaatataaaacaattagttggacatggtggcactcatatgtagtcccagctacttcagaggctaaggccggagaatcacttgagcccaggagttcaaagttgctgtgagctatgatcacgtcactgcactccagcttgttaacagaatgagactctgtctcaaaatgcaaaggaattaaacaattgacttcaaacataattgtttcatttgtttggtaagcacatgttgggcacatcctccccctgctccctctttttaatgccagccactgtactgggccttcatagaagaatgagatcctgtagagaatgagattaagaatgactaatgattcttaatcatttttcctgccacatacccctctagcaacctggtaaaacctatacacaaacctcttcttataaaaatgtttagaaacacttaaaatgaaattcatagaggattataaagtaaacttatgttgagatagttgtcagaatattaaatttctaatatagtagcacatactatattattaactcatgaaataacaagacctagcagtggatctaataagtattgtaattttgaataatgatgtgcataaacacatttttctaggtatctacatcagctgtacaatgatgaaactatctatgattcctattggtgatcaaagttataggaaccttatacctctgaagtttgttgcctgcattttaatagaaggaaacgctaaatggtagttagagattggtggaaatctctaactacaattcattccccatccaagttgacaggcacaccaaaccacagatctgtgtgggtcagcagattgcatgttaagaatccctgatctaggagctttagtttaggctgtgagactgacacttcagtgggtagttatataataattgaaacctgagcaggggttttgtctcatttatctttacatttttataatctcacagtgtccagtaaacattaaacagttagttattaatagagctagataaataatttgggggtatatatgggagattacttctgttagaagaggtagcattgagctgtattctaaatttagtatacattggaattttcaggttggatgaagtaaggaagaggtactcagaattgaggcatgctcataggaatagcatcaggaagggtatgacaggtttgatgattattgagagtcaagatacacatttaagggaatggcaagagatgagaggttgagataatgctggggctcagattataaggagagttttgtgtatactaggcaactggtaacttacaatgatatggtacaatcagctttgtgttttaggaagttatctcagttgatgtcatgacagaaaaatgggacagagtgggaagaaattagaagcagaggccagtgaagcactgttgcagttattacaggttagagagggcagggtcatgatggtagcagagagatgggaaacagcgatccatatctgggagaagaggattctatgcttgactgaatatgggatgtgaaggagaagaagttgtggcctcaatctacccaattgggagactggtgcatgggccatggtagtgccaaaacatagagctattaaggtaaggaatgcaggagggaagagtaggcatggtggagaagatagagaaatttagttgtacttagtaagtttgaggtaggctgagattcaggtaacagttttcttagtaggcaattggggtgagagattttgaaattttaccctttagatcaatcacttttagatcattacagtaatttttttttttttttttggtttgaatttgttttattcagatacagtttacatgcagtaaaatttattcttttttaggtttgcagtttgatgagtctgacaatgtatagtcatataaccaacactacagttgagatatagaatattaccccagaaagttccctgtaccttttagtgattctcttctcccccacatcgagcccctggcaagaactgatgtgatttttatccctacagtttggccttttccagaatgtcttataaatgatatcatacattgtgtagccttttgtatcaggttctttcacttagtataaatgcctttgacattcctctatgcatgttattcctccatgtatcagtagtgtatttttgttgcaaagtagtattcctttgtatgtgtgaaggttttaagaaacacacctacctgggctacaaaccctaatatatctgaattcagaaggatagccaggaaatggtaatttcttggactcccgtctcatggtatgagataatggtactagggagtagagtgcaaggaggtcatagtgtcaaatgtgcgtaggtggaatggaacataagaggctgtgcttaggactgtttttcatgtttggtttagaagggaaggtaaatgtgacagtaacgtaaaactttttaaagataaataggtgaaagaaacaaatcagaggtataaggaatagggaagatttaacaggagactagaagggatggatcaactctgtagacgtggagagggagaggaacgcttttttctttaaggtaaaaggagaactagtatgattgggtgctgttataagtgaattgagaggacttacagatttttgatctgagtgtctggatgagtagacttagtaggttgactttagagaagtaaacttctaattaattcaaatactggttttcctgttttggaacatgttcctttttcatccattgtttcttagttttgtggcactttgctggttttcaagctagtgggcatcaagcttttctctggccagttctttcctatcctgaaacccttcagtggaaaaacaaatcatgttctgccttaagagtatgatggttattaagctattttgtattccttggaggaaaggatatacaatcctggggattcaaagaagtgcttcttgaaatgaatgtgaagttttagtatcagactagaggtacagacaatcataatgtagaaagcatagatgtttccctttctccaattttcttttccttggggttacatcttttaatagttaattctgagtttactagttagaatttatgtctttgtcacaggaaggggaacatcacactctggggactgttgtggggagtggggagggatagcgttgggagatatacctaatgctagatgacgagttagtgggtgcagcgcactagcatggcacatgtatacgtatgtaactaacctgcacaatgtgcacatgtaccctaaaacttaaagtataataataaaaaaaagaatttatatctttgtattgtttctaattcatctttcctgaaaatgtttggtgcacatacaaacaaactgatatgtttgtttgcctctacactgatggtatacatacagttttgaattttgcttttcttcacgtgataatcactttggagatcttgatgtgtgtgatgcacattctaagggttgaagagagaaacattatccctataccaatcttagaggtagtcttactttatagacaagtaattgaggactagagaagttaaggcacttctctacaatcacagagaatcagtatgtggcacagttggaatttaaatctaagtttggctgattcagagcccattcttctgtttttggcatgttgggtgtgaggaatgattcttggtttcagcatattgtctgttaccttatagattaatagcccattgtattaacgcatttctgttagtgaattagtcctatcgggatacatacacagatgcaccccttggtttttctaaaagaacatgctgatacatattaaaatacaaacccactgaaagacagtgcttgtaaagcattctaaaatgtctctatttcatgaaccagctacttaatgtattacaatatggtagtcttattgaggtttataaattaaaaggcagtattttctgctagacttgtctacttgaactcaacacaagagttcagattagtgagccagtttacatactgaccagtctgggccctgtgatcattagggcctgcttttcaacttgcttgtcagctgggtagaatacaagcttgctatggcttccaggaatgtgtatgtggacttgtctgaaatagcagagttgggacatacagaagttgagaaaggaactattgtgttttcttgtttactgcatgaacctcaatttgttatagatacggattgttgaagacctgggttctaagccattggttgcctgagcactcttactctggaccagaccttgtttagttaaagcatccttaaaaaatacatacattggcatttctggtctgcactagctgccaggacagcacttagttgaacagaatacttagattgattttctcgtagtcatgtacttatagtagaagagataaaggaattgaaaagcagtcgtaattgcttctgtaaaaatcccagactcttcagtgaaacaaaaaagcaggatgttacttgtgaaatggtaggactggatagatggagccttttgcaaaaacagattttgtcatgggcaacagatttcttaaaggctcccggtccctcatggttccattgctgggattaagcctttttgcattgcagcatggagagccttttatttgagttaaattcagacttcttggtatgtcatctgacagtcttgtggtttcagataaatatggttcattgctgttattaacctgggttgacagttgtgcatgactggagtttttagggattttgaaaagtggaactgcttaagagaaataggatgccactaatgtagagcttaacttaatgtgatattcaagtgtgttaacatcaaaataatccaaatctagttattaatttggtgatatatttgctttaaaatatctgaaaattttaaatgccaagattttagatacttattttattgaaagttaaattatgataataaccttaattattagaatgacttcttgaaaatgttttaagcaagtattaattattgttttaaaatatgtaattcataaatactgtacagtatgttagtccttggtttatgtttattttatgattctctttctgccatttgttgctcttctttcttggtatgtttacatgggaaccttcactgcagatttttggaaagcagtgtgcttttctgtttgtatcccatatatatatttataagtaaaatgtaaattaaaagcttgacattgtattagtgtattgatcataatccagttatttttatagttaacggtattctctaattttactgacatggacctgaatttatttagaattatttttgatgctttgtgaacaccttaaatgtgtgtccccacttagtcatttgagttaaataatttgaattagtaatggccttatactaatttaggtacattgtttttattttattttattttattattagtttttgagacgaagtcttgctctctcgcccacgctggagtgcagtggcacaattttggctcactgcaacctcagcctcccgggttcaagcaattctcctgcctcaggctcccgagtagctgggattacattacccctggctaatttttgtatctgtagtagagatggggcttcaccatggtggccaggctggtcttgaactcctgacctcaggtggtccaaccgcatcagcctcccaaagtgctgggattacaggcatgagccaccatgctggcctgtttttttattttaaataagtcacattatacaagttcccccctttttaaaaaaaaaaaaaaactgtgtatgacccagttaaacaacttggatactgggtctctattgttttagctcatttaacattcttccagtgttttgctgtagtttttaagttcacaggtatatagagttaatgtcagaaagttaaaccacataggccaggtacatttcaattaggtatacgtattgctgaaaaatactaagtaaatatgatagcatattatgatacatgatagctcttatggtgtagaaatctactatttgccaatgtgccatttttaccaagaattcatgttaatgaattttttgtgcatataattttatgcatgttaaattgtacaataaatataaatgaattttggaactttaatgctggtaatagtttatatttttgttatggtatttttttcacatctaatttgattaaatgatgatagtaatactatggccaagcagctgactatccctgtcattgaaatgtaaattacagtcactagaattacattaataccctgagtatagttgaatttattgtgacaaaataagtctaaagattagtgttcttacaacatttagtatattaagatgtagttagagaaaaataattggatataaacagcctatataaatattaatcaagattttgtgatacaaataagtcctaaattgataactaaagtctttggaactgagattagcaaatcagtcatggaattattttcctgtcagattagagaattataattccttagatagaaaaatgattactatatatacaggcttccagcattaaaatggtactccttgaaataggcatttactcacttgtttagcaaagtggttgaagttttattacattcattatctcttacagcttcttcctatggtatttaggttaatttgtgattaaccagttgtcaatctggaaggaatttccacagcttacaagatcaaattgaattatatagaaactggtacaaaatgatgtcttgtcactgatggtcctacctgcttaagaacatttcttttctttttttttttttttttttttttttttttgagacagaatctcactctgtcaccaggctagagtgcagtggtgcaatcttggcttactgcagcctccgcctcccaggttcaagcgattctcccgcctcagcctcccgagtagctgggactacaggtgcacaccatgcccagctaatttttgtatttttagtagagacagggtttcaccatgttggccaggatggtcttgatctcttgacctcgtgatctgcccacctcggcctcccaaagtgctgggattacaggcgtgagccaccacgcctggccaagaaaatttcttttaagcctgatagtaggagatactttcaagtggagtgcagtagagttgcagtgatataagccgtagtggttaatgttaggtctcagcctgactggattatggaatacctggaaattggaagagcattgtttctgagtgtgtctgtgaagagtgtttcccgaggagatttggtgtgggagtctgtggacggagtgcagatcagccctcaacatagataggcaccatccagttggctgggggcctagacagaacaaaaaaaaggcagaggaaatgggatttcctctgtctttcttctggagctggaacattgtcctgcctttggacattagaactccaggctgtctggcctttgaactcaaagacctataccagtggctcaccaggttcttaggcctttggcctcagactgagaattacaccattggtttccttggttctgaggtatttggatttggactgagccatgctgcttgcatctcgggtctccaccttgcagatggcctgtcatgggacttctcagcctctgtaatctcatgagccaattttcctaataaatcccctctcatatatctgtatatatattctgttgtttccacctctctagagaaccctgaccagtacagaaaccttctagactatgacatttgggcttgactgcttcctggctaaataacttagaaggagatttaaccagcattcaactgaattgtagattgggaccggggaaatttaaacatttggattggagaagtctctgcttgttaaagataagtaggggcagggctttaaaaactacaggccagctgcagtggctgatgcctgtaatctcagcactttgggaagccaaggcaggaggattgattgagaccaggagtttgagaccagcctgggccacatagcaagaccctttctgtagtcctcactacttggaggctgaggcagaaggatcacttgtgcccaggagttcaaggttacactattccagcctgagtgacagagtgagaccgtgtctcaaaagaaaaaaaaaaaagaaaaagcagtaacactatagaatagaggaaagggaatattaatctgcagacttagaaaaagattaggtttctgaaatttactagttggaatcaaaatttgtaatcagataatttggcatcctcaatagtatgcaagaaagaatgttttctgaaacagcagagcatgagaagaagatacttggcaaagaagatgtaagattacaatgaaaagggagatggagaacataaagattgcacagaaatgaaaatttatgtgacaaaattaggttttatagggctgttaataaaaagtagagttgataagtggggtatttagtaagtgtcatgaaggtcaaggatgaaattctgctgaaatacagaggaaaaagaaaaggtgaagaaagtatcacctgttatgtgctttagagttatgtactgtaaagataaaccattggaacagaagccaatatcagatacttaaagtgaagacatcagaatagaagaaaggatatttacacgcagattaaaagggtttaatattctttaaaatgtgaattaaaatagttttgatttctttttaaggaaagcatgcttacatttgccttttattgctggatttctcaactcatcctagtaggtactaatggagaaagaaacatgttctaacatatcctcagggtttgcctaaagaggtgattttccatcaaacacttacattcactgaaagaaaacagtttatgatgcatctgaaagaaagcatgcttacatttgccttttatagctgaatctataaacccatgtaatatgaatcaatagaaaaggaaacatgtcttagaaaggtgtttctccctcaaacacttccattaactgaaagaaaagttttcatgatgcttttttttttcccccgcagacaaggtctccctctgtcatccaggctggagtgcagtaacattgtcacagctcactgcaatctggacctcctgggctcaagtgatcatcttacctcagcctcccaagtagctgggactacaggcgtgcaccagcatacttggctaatttttcattttttgtagaggcaggggctcactatgttgcccaggctggtcttgaactcctggccttaagcagtcctcctgtctcaacctcccaaattgctggaattacaggtgtgagccaccacacccagccgtatgatgcatcttaaagaaagcatgcttctacttacctttaaggaagttttaatttcaccaagtatagtgtcatagagcagtataacagccattttcatgcctgaaaatggcaaaattttgatatctgagtgaggagttattgtatctagtcctcgattctacaaaaatattgagtactatctataaacagtaaataattgatgcatgtgtagttctggttctcaaatgcgtatagatgttcttttcagtagtgctatactaaattcatagtatctttcagtcgtattttgttagttactgtgtacttaatttttaaaaaacattaaataggtatgaccaggtatggaggcctgacacccctaatccagctctttgggaggctgagatggacagactgtttgagcccatgagtttgagatgagcctgggcaacatggcgaaacctcatctgtactaaagaaacaaaaattagccaggtgtggtggtggacacctgtggtcccatctactgggaggctgaggtgagagtcacttgagcccaggaggtcgaggttgcagtgagccatgaacatgtcactgtactccagcctgggtgacaaagtgggaccctgtctcaaaaaaaaaaaaaaaaaaggtgttttaggccattcttgtattgctataaagaaatacctgagatttgatgatttataaagaaaagaggtttaattggctcatggttctgtaggctgtgcaagaagcataatgctggcatctgcttggcttgtggagaggcctcaggaaacttgcagtcatggcagaagatgaatgaggagcaggcacttcacatggctagagcaggagcaaaaaaaaggcaagggggcgtaccacacgcttttaaacaaccagatctcaagagagctctctcacgcaaggacagcatcaaagggatggtgctaaaccattcatgagaaactcatccccatcatccagtcacctccctccaggctccatctccaatactggagattactttcaacatgagattttggcagggacacagatccaaactatatcaaaaggtatcttactagaaatggttaggaattactgataacaggaccatatgctcgcagttgtttcaattgaggcttgcatattaatggaaaagtcaactgaagtgaggaatttaaaaattatatattgtaacattttgtttttagcttaaaacatgtaaatattgatatggtttgggtctgtgtccctgcccaaatctcatgttgaattgtaatcctcagtgttggaggtagggcttggtgggaggtgattagatcatgggggtggagttctcatgagacctaaaactgtgtagcacctcccccatttctttcttcctcctattcccgccatgaggtgcctccttcttcgcctttctccacaaatataagttttcctgaggcttccccagaagctgagcagatgccagtatcatgcttcctgtacagcctacagaactgtaaggcatttaaaactcttttctttaattacacagtctcaggtattcctttaacagcaatgtgagaagggaccaataatatgcattcatttgccaatcttttgctggccattgtagtcgtgtgtgtgtgtgtgtgtgtgtgtgtgtgtgtgtgtgtatttgcatttgcaaagtatgtgagatattttaatacaggcatacagtgtgtaataatcacatcaaggtaaatggggtatctatctcctcaagcatttaccctttgtgttacatacaatccaattatacttttagttattttaaaatgtacaataaattcttgttgactgtagtcaccctgttgtgctatcaaacactagatcttattaattctactgaactatattttggtgcccattaaccatcctcactccccctgccactacccttctcagcctgtggtaaccatcattctactctatctccactagttcagttgttttaatttttagctcccacaattaagtgagaagatggaaagtttgtctttctgtgcctggcttatttcaccataatgacctccatgttgttgcaaatgacaggatatcattcttttttatgactgaataatactccattgtgtataagtaccacattttctttatccatctgttgatggacgtttaggttggttcccactgatttcctttcttttgggtatatgcttagcagtgggattgctgtatcatacagtaattctgtttttagtttttttgaggaacctccaaactgttctccgtagtggtcatactaacattcctaccaacactatatgatggttgccttttctctacatcctcaccagcatttattattgcttgtattttggataaaagccattttaactggggtgagatgatattgcatggtagttttgatttgcgtttctctgatgatcagtggtattgagcaccttttcatatacctgtttgccatctgtatgtcttcttttgagaaatgtctattcaggtcttttgcctatgtttaattggattatttgatttttttcctatatagttgttcgagctccttatacattctggttgttaatccctcatcagatgggtggtttgcaaatattttctcccattctatgggttgtctcttcactttgttgattgtttcccttactgtgcagaaactttttataacttgttgtgattccatttgtctgttttcactttaattacctgtgtttctcagaatatctttgcctagttcaatatcctggagagttctcccaatgttttcttttagcagtttcatagtttgaggtcctagatttaagtctttaatccattttgatttaattttcgtgtatggtgagagataggggtctggttttattcttctgcatatggatatccaattttctcagggccttatattaagagactgtcctttctcaaatgtatgttcttggcagctttgttggaaaatgaattcactgtaggatttgtttctgggttctgtattctcttccattggtctgtgtgtttgtttttataccagtatcatgctgatttggttactatagcactgtagtataatttaaagtcaggtaatgtgattcctctagttgtgttctttttgcttaggttagctttggctattctggatcttttgtggttccgtatgaatttaaggatttttttttttctattcctgtcaagaatgtcattggtattttgaaagggattgcattgaatctgcagattactttgggtagtgtggacattttaacaatattgattcttccaatctgtgaacatggagtatgtttccattttttaatgtcctcattaatttctttcatcactgtttcataatttttattgtagagacctttcacttctttggtgaagttcctagatgttttatttgtagttactgtaattgggattactttaaaaaaccttttttcagattggtcactggtggcatatagaaatgctactgatttttgtatgttgactttttatcctgcaactgtactgaatttaccagttctgatagttttttcatagagtctttaggtttttccaaacgtaagatgatgtctctgcagacaagcttaatttgacttcttcctttccaatttgtatgccctctttttctttctcctgttgaattgctccagctaggacttcctggtcagtatgttttacagagggaatgatgaatgctatttctttgtaggaccaaaaaattaaatgttgtgtaaagtaatagagcattatatgaccatatactttgctgtcagaagacatatttaaaagttggtcagttagcagatttctttaaagtaaaatctattcagaggtttttaaaaactcagaaaactttaccaatgttcagaaaatatttcttcaattggctgtggtgcttttggtttctgatggtggccagttattggcatgttgctgtattgggaatgtttttggcttggctcttgccgcgtaatttagcatacttctctccctccctccttccctccctccctccctccctctttccttccttccctccttcccttcttccctctttccctcctgtcatcaaactcagaatgtttttcactgcttggtggtggtggtgaatccctaattctacatgcatagcttttgaaacttggctcctctttttctattccatgtaggagcataggatgttaatggtttctcagaatgatctgtatcaccttccgtgttttcagtgagaaataacaatgatggataaggctcaggaaagaacaactaacatagttcaagacacataataggcactgtacagataattacccaattcatgaactaaaaaaatcttcatgtttgataagtatactctatagtaagaccctctgatgctaactagaggtgaaaatatatggatggtcaaatggaaataagggtagagaaagagaagagattaactggtatttatttacaggttcatgaaattcaattttaaaatgattgataaggaaaagagttgatcacttagaaacacaagtgaattatttcggtattttccttataggtgacaatttttaatgtattgagatacaaactagtgtttagcccagtatttctcaatacttttttttcacttatattcccccaaggagcctttttaaaaattaacaccctgatttctttttttttaatttcaacttttattttagatacagggtgtacatatgtaggtttgttacatgggcatattatatgatgcttaggtctggggtatggattccatcacccaggtagtgagcatagtactcaataggtagttttccacccatgctttttccctcttccctctagtagtccacagtgtctatttttcccatgtttatgtcagtgtatgctcaatgtttagctcccacttataaatgaaaacatgtggtatttggttttctgttgctgtgttaattcacttaggattatggcttccagccgcctccatgttgctgcaaaggacatgatttcattcttttttatggctgcatattactccatggtgtatctgtaccacattttctttattcagtccaccattgatgggcccctaggtttattccatgtctttgttatcataaatagtatggtgatgaacatatgaatacatgtatccttttgtacaacaatttattttcctttggatatatacccagtaatgaattgctggatcaaatggtagctgttttaaattctttgagaaatctccaaactgctttccacagtggctaaactaccttcccactaacaatgtataagtgttcctttttctccacggcctcaccagcatctgttgttttttgactttttaataaaagccagcctgattggtgtgagatggtatctcattgtggttttgatttgtctctatctgatgattagtgatgatgagcattttttcatgtttgttggctgcttggatgtcatcttttgagaagtgtcagtgcatgtctttggccatttttttaatggggttgttttttgcttgtagatttgtgtaagtttcttacagattctggatattagacctttgtcagatgcacagtttgtgaatatgttctcccattctgttggttgtctgttttctctgtttataatttcctttgctgtgcagaagctgtttagtttaattaggtcccacttgtcaatttttgtttttgttgcagttgcttttcaggacttagccaaaaattctttgccaaggccaatgtcgagaagggtattttctaggttttcttctaggatttttaaagtttgagatcttacatttaaatctttactccatcttgagttaatttttttatacggttaaaaagtaaggatccagataaggctagccagttatcccagcaccttttatttaatagggattaacacccttttttgttaagcaccattccccctccatgaaattttaacaccacagatatgctgtgtatttgcctatgtactgtggcccttttgagggctacatcccacttaatatctaagtatttttctcttcccctccccaccaagaaccagtttgccctcttggaagtgatcttgcccgcattgagaatgcatggcttagtcctattttagttgtcagtaatgtgtgttacaggagttcacatggtcttctgaggtgcagcgtcagtgtgtaaaggaaagtgtctattccagcatgtttattttctattagcattctttgaaggtgtcagataaaaaaacatgcagagcagataagctgacacactataaataacatctgggtaaagtcttaaaatagcttgtggttcatcactgaatagttttcttaccaacgtttaaatatgctaaatacaattgcttaatagtaattactaagaaaagtttttctgtagcatataaatttgtgtgaatggtggtggtatacttaacactgttagtgatttggcttacatttgtcttcagttaaattttgataaaaaagaaggaacatgatgaagtggaaggcagtatcagaagacttaggttctggtaaaatgagagatcattctaaacacttgagtactgagcataagcaaataccagtgaagacagagtagggctacaggtgaaaagaagaggcaccagccagctgtatccagaacagcaactttaggtaggtcagttttgcttctccttcacttctttcatttgatgaaatgaataaatttagaatgactattaccatttaaacttatttgcctattaaaagagccactctgttgtgattgtttgttgtttaatatcatattctaagcaattaatttgtcaggcaacttttaggtaataagtttatttcgttaatttcatgtgtctatagatttccatgtcacaacttctttctattataaggtaaagggaatcagaactttattagtaacacttcaccatttcagggacatactctgcagaagtacacatgtcttcccagataattttgaccagcattttgttttcattttttgtttatgactctagggatgtctgatctagaccaaaacagcttcaccaagatttgtgtttaaacataaagctatgttattttcatctctgctttagacattcctatcttattcagatatgacccaaaatataagcccctctatgaagtgagctttcatgttttactccatccttccctcccccgtctaataatgcctatgctgccttttctttgcatcatttagaactccttccttgtgtccccactttcttcccaatttgtccacctttttttttttttttggccttcagaggccgtaattcttccttttgcccttccagtagggaatgtttattttgccacacactacccaactttgggcctagtaacttggccctgtcactattgcctggaaactattcttgtcctctcatgaaaacctgttctttatgaggcctatgatattgtaccacactttcctctattttgttattggcatccatggctgacatgtaccagatggttgcccactgttcatcaagaactctgacacttggctgatagtccttctttccagatcactttgtgcagtcatcttaagcagcccatacatctaacattttggccttccagttccttctcttattctctacctttatgtgttcttcttggctgtaccttgagccttgttagctaactgactctcctctctttctgagatcttcccattctgaccacaacttcatatcctttgatctctcatatccttattcagacttgtgctttaacttcgttgagaccactatatgtgtttgttttatacttccttttctcctatcagctccattctggccacatttcctcagctagtcagtcctgacttttctttctcactgtcactcttaacagccttgctccttttcattgtggctgctcagaaaatctactgtttaatccattgcctacttttggccctttcacacctggaatcttctgtggtagtacagaaaattagtcctatcacagatttaaggctttccactcagctgggcccccaaatatggtttgatagtccttttgcttttcttgggctagctcctttccccattttctttgatgattatgctggacttttatatctcaaatcctgtactccaattcaagccacccacctcacatatgcttgtaaatatgcttgaccgctgctttttataaaacatgaatgatcagctataaatgctcgatttcatctctccagcttgcatacttacctgcagtaattttcacctgtgggtcattttccctacctcattaagtgtattctgctgttcattaggggcacccttgcccgggatactgtgtcttaacttctctgtgatcttaatccaaaaattctctctgattacctttaaattctttttctgattccttcccctcaacttggaaatattagaaaggaaatagatgccttttttcctttatattatacacctgtgtatttcatacacatacacgtttttcctttttttaaaaaaagggctcttgtagcctcacttcttctacctgagtgaccatgcatcttggtgattcaagataatttcagtttatttctgtctgtttaggatccctttttagttttaaaacttcagtttagatggttggttatatggtcacactattcctcactgttccttttttacatggaatattatatactgtctttctcagctctttctcttcaatcaattgctatatggttattccttccccactgcctccactgaaactgttccagcaagagtaccaaagacaccaaattgctaaattccatgaacacttttactcttcataaattttggtctttctgcaacatttgcattgtgcgtgattcctttcttttcatcttcattaacctttttttttttttgacacagtctctctgtcgcccaggctggaatacagtggtacaatctcaatctcggctcactgcaacctttgcctcccaggttcaagcgattctccttcttcagcctcccaagtagctaggactacagacatgtgccactatgcccaactaatttttatatttttagtagagacgagggttcactatgttggccagggtggtctcgaactcctgacctcaggtgatccaccagcctcggcctcccaaagtgctgggattacagacatgagccaccgtgcctggcccatcttccttaacttttgtaacagtgctttaccatgagttttcttttcctctctagtagtctgtctttactgatcttccctggcttctctgcttttcttctctctgttcttaaaatattgatgtatcctaaaattctagtttattagttcttcacattcttttctattttcaattaatatgttctgcctgaagatttcactaccaattgtgtgtcagtaactcctgtgtctggaactctgttcccagccattctcctcagaccatttttctttttctttttcttcttcttcgttttttttttttttaagattgagtcttgctctgtcacctggtctggagtgcagtggcgtgatcttggctcactgtgacctctgcctcccaggttcaagtggttctcctgtcccagcctcccaagcagccagaattacaggcgcccaccatcatgcccggctaatttttgtatttttagtagagatggggttttgccatgttggccaggctgatctcaaactcctcatctcaggagatccacccaccttggcctcccaaagtgctgggattacaggcgtgagccactgtgcccggccaccagaccatttttcatcaatcggttgcacatcttttcttcagctgtctcgcagcccccttgaactcaatctggcaacacccttatcccaaacttactccccctcctgagatattctttatcttggttaatggtatctcctttcatgaaatctgaaagctgagagtcagccattctcatcctttattccccatatagtcttcaggtcctatctctgccttctaaataagatctagctctatccctttctattttcagtgctattccttagttcagggtatataacattcttttctccaggcttctctctatcttgtcagttcttcaagtttctgattttctaaaatgcacaagtgatcttgtcagctattgtttaaaacctttgtttactcattgcctggatgaagaagtctgtatgtgtgtgttgaactggttatgtctgttgatctgatgctccagcctgccttcatagctgtgcctgttgcttcattgcacacttctgagctagggtcactaagaattacagcagatgctgttttcttcttccagagaagagaatgcccttctcccctgcccatcacttgaagctgaaacttgaagtatcacttcctactcaataggccaaggccatacacaatgatttagataatggactgaaagactgcctggaatctaaacccagctttgacacatttactagctagctgtgttattttgggcaggttatttattatttattgtatgtcgtttatgatttttcttcagtaaactcttacctgacctgcttatgcacacctcttatctagattgtaagtttgcctcagtcatagcatgtatcacgttgataaaatcatttgtctgtcttttctgttagactgagcatttcatggtatggctatctttttcttttcatgctgaatgaacgcttttaagtcagtgaatgaatacataaagaatgtgacagagaaatattcccagtacctggcattatgctgtgagtgtggtaaatgtttaatatgtctgttttaggccggacatggtggctcatgcctgtaatcccaccactttgggagaccaaggcaggcacatcacgaggtcaagagatcaagaacatcctggccaacatggtgaaaccctgtgtctactaaaaatacaaaaattagttggacatggtggcatgtgcctgtagtcccagctactcaggaggctgaggcaggagaattgcttgaacccgggaggtggaggtttcagtgagctgagattgtgctaccgcactccagcctggtgacagagcgagactctgtctcaaaaaaaaaaaaaaatctgttttaatgagatgtccataatgtaatgtaacttgatgaatatagtattactttttttagtagtctttctcttttaaaaattgagctataatttgcatataataaaatgtataatttattttgaaaaatatatgcatctacttaaccacaatggcaataaagataaaggacattttgatcactctggaaagttccttagtatacatttctcctccatttccctcactccctatccctgatcactgctttgatttctatcattgtccattagttttacctcttctacacataaatagaattatcagtaggtgccccattgtgtctggattctttcatgcaacagtattttttgagttcatctttgttaccgtgggatcagtaattcattccttggtatttctgagtagtatttcaatgtaggaatatatcgtagtttgtttatccattctctgtggcatttgggtttaaataaaactgcagtgaacatttctgtgagagtatttgtgaacatttattttcatttttattggataaatttcctgtgagaggaattgctgaatcatagctgtcaagcaatattccaaaaatggttgtacacttttacactcctactaacaatgtatgggagttccaagggcttcatattattaccaaccactggtgttattagtcgtgtcagttttagccattttaatgcttgtggccattttttttgtttgtttgtatgtttttgttttgttttgaaacgatgtttcactcttgttgcccaggctggagtgcagtgatgcaatcgtggctcactgcaacctccacctcccgagttcaagcaattctcctgcctcagcctcccaagtagctgggattacaggcatgcaccaccacacctggctaattttatatttttttttagtagagttgggatttctcccatgtaggtcagactggtcttgaactcttgacctcaggtgacccacctgccttggcctcccaaagtgctgggattacaggcgtgagccaccgcgcccggccgtggccatgttttaatttgcatttctctgatgattaacactgttaattatcatttccacatactgattatccattcatatatctccttttgtgaaatgcccaagttgtacctgtacccttttaaaattggattgtttattgcttactgctttgtgggggttgttttggctgtttataagtttttatcagatatgtgcattgcaaatattgtcttccaatctctggactggtctttttttttttttttagatgttcaggtttaaaatttttataaagtccaacttaccaattttttattttatgcatagtaatttttgtatcttgtttaagaactctttgcctaacctaaggtggcataatcacctgtgtttctttatagaagctttataattttacctttttcataaagtcctattttaaattaacaaagaatacaaattcatggctgggcgcggtggctcacacctgtaatcccagcactttgggaggccgaggcaggcagatcatgaggtcaggagatgaagaccatcctggctaacaaggtgaaaccctgtctctactaaaaatacaaaaaattagccggacgtggtggctggcacctgtagtcccagctactcgggaggctgaggcaggagaatggcgcgaaccggagaggcggagcttgcagtgagccaagatcgcgccactgcactccagcctgtgcaacagagcgaaactcttgtctccaaaaaaaaagaatacaaactcacaaataagtttggtaataaagccttttttattattgctgagatatacttcacattccataaaatctactcttctaaagtgcgtgattcagtgttttaggttggtttggttgttgctgtttttgtttgtggtatatttacaaagttttttggtgaccatcaccactgtctaattccagaacatttcatctccccagaaagaaacctcgtacacattgcagtcattatggatttgcctattctggacaagtcatgtaaatggaatcatcatacgtagcctttttgtgtttggctttttttccttaacctaatgttttcaaggttcacccatgtagtatgcattctttttatggccaaatactccattgtattgacataccacattttgtttattcatgagttcatggacatgccttttaactttttaaagaaagcacatttgttttttcttcttctttttttttttttcagattgtggaatccattcactcctgaaatatttagtgcctatgatattacatttacttagggatatgtagttttactcatttaccaagcttgggactggggattcaaagatgaataagatcttccctcagggagctttttttttctagtggaagaaacaggcatgtgaacagataaattacaagacaatctgatgaagatactattagatttataatctaaggtaaagtgtaatcccaaaactcagtagctaactctgcttggaggaatgaataagaactttttagagtaggtgacatttggagctagatctttaagaataaataagagtttgccaggagagtgagaatatttcaggtagaagacatggcttgtacaaaggcatggaattgatatatcttggcacctttgagaagctcagtatgataattatgggtaacatgaaaagagtctggaaaggcagatctgggccagcccatgaagagctttacatctaagcaaaggaacttggattttattctttgggtgtctgggagaccaaaggagtttggctaaatgaaatggcatcactgcttatataaggtctgttagaagaccacatatccagtgaagcccaacttttcattttctccagaaaattttgtccatattaggcaccttttaaaaaatgaatgtattggccaggtgtggtagctcgtgctacctgtaatcccagcagattacttgaggccaggagtttgagaccagcctggccaacatggcaaaaccctatttctactaaaagtacaaaaactagctgggcgtggtggcacatacctgtaatctcagctaattgggaggctggggcacaagagtctctcaagctcaggaggcagaagttgcagtgagccgagatcatgctactgcaccccagcctgagagacagagagagactctgtctaaaaaaaaaaaaaaagaaagaagggaagaatatacctcccctcaacccaaaccattctctcactaccaccttctatcatagtctattgacttacctgaagttatcaagttaatttatttctttgcttagctactgttgtatctttcttccagagaggttcttttttatcttgccctaaccactgcttggcacatagtaggtacatatctgtatttaatgattaaatgagctattctacctctaatatcttaaactctaggatcctgccctgtgattatagcctcctattccttgtcctctctgcctcccactctccttctttgcgttttttcagcactttgaccgtactgcctccattttcttttgttattgttgtcccatcactacgttccctaactagcttagatcaattcagctgtattcttgtcagtcttatactccatttccatagccttccttttcttttgttccgtatacctatcaaaacccttaccttggcacagtctgatccaaattcaagcacatgaggtcctactggagaaaatcacctaactgtagtttgcagccagtacatcgtcctagttcatagtcttcaacgttatgtagatgtacagcattgcctggaaatcttatgttttctattcaacatacactcatgcaccagtgaatgatggggctctgttctgaggaatgcattgttaggcaattttgttgttatgcaaacatcacacagtgtacttacacacactagatggtatagtctactacacacctaggctgtatgataatagcctattgctcttggggtacaaacctgtacagcgtattgctgtgctgaacactgtagggagttgtaacacaatggtaagtatttgtgtatctaaacatatccaaacatagaaaaggtacagcaaaaatatggtataaaagataaaaagtaggccgggcacagtggctcacacctgtaatcccagcactttgggaggccgaggcaggcggatcacctgaggtcaggagtttgagacaaacctggccaacatggtggaaccacatgtctactaaaaatataaaaattagccaggcatgatggcacacgcctgtaaacccagcaactggggaggctgaggcaggagaatcacttgaacccggaagcggaggttgcagtgagccaaaatcgcaccactgcacttcagcctggacgatagactgagactgcatctcaaaaaaaaaaaaaaaaaagataaaaagtggtacacttatatagggcgatccattcacttactgtgaatggattttgcgagactggaagttactgggtgagtcagtgagtgagtagtcagtgactgtgaaaacctaggacagtgttgtacactactgtaggttttataaataagcactgtatacttaggctacattaaatttattaaaaatgtttttcttcaataataaaattaaccttagcttattgtaagttttttccttattaactttttaattttaaaatcttttgaactgttgtgtagtaacactttgtttaggacacaaacattgtacagctgtacaaacatattttctttctttatgtgcttattctaagcttttttcagttaaatttttttaacctttttgttaaaaactgagacacaaacacaccattaacgtaggcctacatagagtcaggattatcagtaccactatcttccatctccacatcttgtcccactgtaaggtctttaggagtaataacacacatggaactgtcatctcttatgctaataatgcctttttctggaatacctcctgaaggatctgcttaaggctgttttacagttaatttttttataagtaggggtacactttaaaataatgataaaagtatagtaaattcataaaccagtaacatagtctttttttttttttttcttttttttttttgagacagagtctcactctgtcgcccaggctggagtgcagtggcgcaatcttggctcactgcaacctctgcttcctgggttcaagagattctcctgcctcagcctcctgagtagctgggactacaggtgcatgccaccacgcctggctaatttttgttttgtacttttagtagagacagggtttcaccatgttagtcaggatggtctcaatctcctgaccttgtgatctgcccacctcagcctcccaaagtgctgggattacaggtgtgagccactgcacccggccaacatagtcttttattatcaagtattgcgtattttacataattgtatccgtaataccttcatatgactgacagtgcagtaggtttgtttacatgagcatcaccacagacatgtgcgtaatactttgtgctaccatgtgatgacagctacagtgttactaggcaataggagtttttgaactgcattataatcttatgagaccaccatcatatatacagtttgttgttgaccaaaacgttatatggtgtatgactattttatttcccaacaactgctattctcttttttactctctactatccccacatcttaccacctttcccttacttgccttcacctgcttgacaaagaaaatggatctcttagatatggattccctccgcaccttaccttcatatctacaaatctttctgcacccatgtacatctttatctcctttctttccatcctagtgtgagagttattttctttgagctaatgctttcacttgtgctctatatcctgttctctacttcctcagaggccttgtatttctcctccacctcagattctgtcatcagcatatatgtaaacatgttcagatgtgtcattttttaaatagcagaatatctgtcactctcactctacttgaggtttcattttctttctctttttttcttaccagttgtctgttttctctgctcctattcactcttcagtcccctagaatctgacctctgtactctttattccttagaactgtccttgctatggtcaccaatgacttttgcttctctagtggatactttttagtgactcccgtggtagttctttttcttttctaaaatgttctttttcactggtttccgtgagacccctttccctattttcatcctttgtcggtctgttcctttacagtttcctttgcatggtatgaaagcacaatttagtagaaacagttcagtgtgatgcaagtcattgtggtttaaggaggagtctctggtttagcctggatgtctaggtaggtctttatcatttactagcacacagacatttactaaagattagacagaagaaaaccaaaattatattttctgtcaagaatttgggatgaagatgttttatgttgccggttacacatagtttcacatacgttgacagagttagggttaaggctctcttaaggaagtgaagaattgtgcctggtggacaacccacataatggcagaaaatattcacaaactgtacatttgacaaaagtctaatatacagaatctataaggaatttaaacaatttaacaagcaaaaaacaaccccaataaacagtgggcaaaatatatgaacagacagttctcaaaagaagacatccaaccagccaacaaacatgaaaaaatgctcatcatcactagtcatcagagaaagacaaatcaaaactacaatgagataccatctcacatcaatcagattggctattattaaaaagtcaaaaaataacagatgcaggtgaggctgtggagaaaagggaatacttacacaccattgatgggaatgtaaagtagtttagccactgtggaaagcagtttgaagatttgtcagagaactttgaaagagagctaccatttgactcagcgatcacattactgagtatatatccaaaagaaaacaaagctaccaaaaagacacatgcacttgtatgttcattgcagcattgttcacaatagcaaagacatggaatcaacctagggagggtcccatcagtggtggattggataaagaaaatgtggtatgtatgtactatggaatactactcagccataaaaaagaatgaaatccagtcctttgcagcaacacgaaggcagctggaggccgttatcctgagtgaattaatgcaggaacagaaaatcagataccgcatgttctcagttataagtgggagctaaacattggatactcatggacataaggatggcaacaatagacactgaggactagtagagcaaggcaggagggagaggggcaagagttgaaaaacttaatagttgggttgtatgctctctctctgggtgacagcatcagttgtaccctaaacctcagcatcatgagatatatgcatgtaacttgcaccacatgtaccccctgaatttaaaagttgaaattataaaaaataaatagcctgttgtaactaatgagaaacagctcctggcatgtctgttctcccatttcttagcagctgtcctgtcatttgtattgtgttcagtttaccagatatttgtcatttggtttgttttctctttcccttcttctctgcctcacccaccccattaatcttttaaattgtggaatgtaatggatatgtaaaagtacataaaacaaatgtgatgtactgtttaaatacatactgtaaagtaaagatccatgtcagcactatctggtcaaaacagagaacatagtcattgcgccagttcacctgttacgtcccttttctggttacacttttccctccaccttactcctagaaaattactctccaaactctggaggtcattacttacattgttttctttatagtttaaaaactaagtatgaacccctagacaaacgttgcacgtttttaacctctatataagtggaaaaatacagtagctatctgtgtgtgtgtgagtcattgtctgacttcttttgcttgtggtctgtccatttttgcctatagctgaaattcattcattgtgataaatttttccgaagtggaattgctgggatcaacttcatttttactgggatttgttttagtgtatgtgtgtgtgtatgtatacacacacatatatatacacatactaaatttatatataaatttttaaaaaactgtgttctaaagagattgtgccaatttatttattttttatttttattttttgagacagggtctcattctgtcacccagggtggagtacagtggcatgatcacagcttgctatagccccgaccttccaggctcaagcgatcctcccactgcagcctcttaagtagctaggactacagatgtgtgctgccatgcctggcgaattttgttaactttttgtagagacagggtctcactatgttgtccaggctggtcttgaactcctgggctcaagtgatcctcctaccttgaactcccaaagtcctgggattacaggtgtgagccaccacacccaggagttgtgccagtttgtattcataccagcagcatatgagaattttcactatacttgattgctctccacttttttttttttggcttgttttttgtcttgtaagtcctttgctattatttaaactgaaaaccatttcatttttcacatttccatattggagaaatagtaacaaaactacttaaaaatatgggttaaccttattatgtcatcttggtccatgacatgaaatcagtacatattttcattatgttaaatatacttatgtatatttattaagttaatgctttcaaaaatcacgagataactatattttatatatactgatagttaccagtattatttttaaataaagataattttgttttgcctttatttttactttaaagttttcagccatgaactggtgatatttaatataaagatatatatattatttaacaataagataattttgggctttattatatagatttatttctaataatgtatatggaatatttattaatgtaactctaatggatctttacttttccttacttttctttcaagttggcctttaccagagtttgatccaagccagattcgactgattgtatatcaagactgtgaaagacgagggagaaatgttttgtttgactccagtgttaagagaagaaatgaggacatatcagtatcggtgagcatcattattgatttggttgacttttaatgttgaacattttgataattccagtattatcaaactggataattggggctgagggagaaggaaatgactggatattggggctgagggagaaggaaatgtttggtgaatctaacattttgatttgaatagctgaggagtggtttgatgcttaggagtcatagaattggagacagtcaagcagacagttgaaatccaaggctaacttaacaaatgtgataagcatgacttctttgtatttagactgctgacaacagctcagcagaacttggctgaggctgatttttttttaattatctcgattattttttattactttttcagcaaacatttattgaagtttttttttttgtatttgatagtatcctattgaatttcaacatatgcctctcccttactcttaattttgattaatgctgttcattttgtgtttgttcagcttttctcttttatgttaaacagccctgtaagaatccactcatgctgttttttgaactctccctgcataccttttctgggacgatgcttcattagtctcattaatttctctcctgcgatgtattccttcatccctctcagcttttctctttgcttggaaacattcacaaagctgctaaaataatttttctttactttttccttcaggtttgtgtttgtctagttcaggctactataacaaaatactgtagactgggtgccttaaacaagaaactttggtttctcccagcatatttgagttttttgtgagggctgtcttctgggttgcagactgctgacttctcactctaccctttacatggtggaaagaaggcaagagaactcttcaagtcctttttataaggacaccaaccccattcatgaggacttcgttcttatgacctaatcacctcctaaagtccccacctcctaatatcgcatggtgggttaggacgacatataaattttgaggagagacacacattcagtccatagcagtgtccttctctgtcttttcccatccctggcctcttcgtccctctcagtcatctttcttggtgtctgttggtgtctctcattttccctttgtctctctatcactcaggctctctagagtgtctcttctcagtctctctgttggtctctccttggtcttctctgtctctcggtgtctcagtagtaatacattgactctcttctcaaactatccagttattactcaactttctgaaatttgcctataaacctactcttctttttattataaaacttttctagaaactcatcagtgtctagaaatcaaacattgttgactacttccagtctcatttattttattatgcctttatcctatatactatctcccttaattgaaaatttatcctccttcagagtttatcacaactttatgaatcctttctgattttctctaggtagatttattttctcctccatcagaattctcataattctttactcatattcatagccttctatatcatagctgtattcgtatgtgtatttgttactagactgggaaaaaaaccttaaagtaaaaaattgtcctgttactcacctttatttcctacactgcacattgccttacatgtggtaagtactcaggacacattttgatcgattgtaattactgttaggaagtttattttcaaaatcctgtaaatactctcctgaagattttatgtcttccttttgaacactactgtacatattgaaatactcattgtttgtcctgggttctatatatggaaagaaggacattgtgctgtaaatttttttaaactttctacattataatttgggttcatacataataaagacattatgtttaagcattagcagtttgctgtatgaaagtaaattattcagctttgctgtatttgtacaatattctattttgctgtggtaaatgttgaagtaacttctcatgttcttctttcttagttttaaaacacttttcttagtttaaaacaatttacaagagagaataaggactataaatattattttgaccatttaatataccaaagccttttcttttttgagacagggttttttgttgtctgtttgttttcttgagacagggtctcgctctctcgcccaggctggagtgcagtggcacaatctcagctcactgaaacctctgcctccaggctcaagcagttctcgtgcctcagccttgcgagtagctgggattacaggtgtgcaccaccacacctgggtaatttttacatttttagtagaaatggggtttcgccttgttggccagactggtctcgaacttctgggctcaagcgaaccgcctgctttggcctcataaagtgctgggattaccagcgggagccactttgcctggcctatttaccaaaacttttattgaaaacattctttttaaaaaaattagaacataatgtcgccatgagttataaacagaaagtcaagctttagaatgtgagccttgcaaaattgttttactctgttcgctttatcaaaaaagaaattaaaacattttctcatttggaagcagcgtccatctgtcctgctatgttgcccaggctggacttgaattcctgggatcacgcagtcctccctcttcaggctacttgggacagtttgttatcagcctgaatctgaatttttgaaaaatatcatttgaaaattgccaagtaggagtagaagatagtaatatttgggctcactcaatatgtttgagtgtatttaattaaatcaaaatcctattgattgtttactgtgaagctatttcagcgttaaaaaatagtcattgtaaaaatacttactggagtccttttaaatgtgtaagacacatggcagttttccttgtaaagattatagatgatcataattcactttgagtaccttttatctggagtgtgagagaaggcaatatttcacagtggaatattgatccatttctgcgtttggttgaaccaaagaattgtcaatgaagaatataacagcagtttattaatataagcagatcatttttgtatttccatgcaaagcaaacattgtgtatgtagagtatatttaatgggttttgggagaaaattaggaagctatgtattttattacattttaaattctatacaaagtgaactacataaatgctttgattatgcttcagaaaccaaagtactttgcatgctcaaatagtgtcttatgtaagttgaaataaaattgttaatcagtgtatagcttcctcagaactcattttttcagatctgttatatattttatgaaaaatgactgttgaattataaaacccaattaaagtgaatatgtgtagtgatcttaaagaagtgttaccggaaaggggtctggatccagaccccaagagagggttcttggatcttgagcaagaaagaattcagggcaaatccgtaaagtgaaagcaagtttattaagaaagtaaaggaataaagaatggcaactccataggcagaccagccccgaggcctgctgattgtgggtttttatggttatttcttgattgtatgctaaacaaggggtggattattcatgcctcccattttttacaccatatactgtaatttactgatgttgccagtggcatttgtaaactgtcatggagctggtgggagtgtagtagtgaggatgaccagaggtcactcttgtcgccatcttggttttggtgcattttagccagcttctttactgcaggctttttcatcatcaaggtttttatgacttatgtcttgtgccaacctcctatctcctcctgtgacttagaatgctttaaccatctgggaatgcagcccagtcggtctgagccttattttacccagcccctattcaagatggagttgctctggttcaacatctctgacagaagaaccttcccgtggtagaaaaatatattgagatatggtttcgatatgaacactaacatagccaaatggatccattctgattttatcacactattatccttatcctagacattgtttttatgtcaacaacagtgcaatgctatttcatgagttcccagttaagttatatgaccattcacatgtatcagctttcactgattctaaacaaggataaagttgtacatcagtaaattcacataactttggaaagatgattacagattttaagacatgagaaacactccgaagcatcgtacagtgctaattgaatagttgagtcttatttatgatatcacatttgcacataggatttggttagataattggatttaggttaatatacagaaatcagtaagctcaatatatgcaaatagcttccagtttgaacacataaaagtgagacattcatttaaaatagaaattaaaatgacaaagttgcctatgcatacacttaacaaaatctgtaagtttagaactttaaaagtcttcttaagggacgtaaaaacgtaccttaacaaatggaaaggctaaacatattccatggcagtagtcaatgttataaagttgtccaaagtgctttgtaaaataatgctatcacagaaacaatgttatccttatttttgtgtgtttggggtgggggtagtgtctggaactaaatagtggattctaaagttcaaatggaaaaaaattagcaatgattggttggaaaactgaaaaagaagggcagtgaggatgagccagtcctatcacatttgaaaatatactgcacagtctcagtatctaaaacagtgtttttttttttttttttttttttttgagctggagtctcactctgtcacccaggctggagagcagcggcgcaatctcagctcactacaagctccgcctcctgggttcacgccattctcctgcctcagcctcccgagtagctgggactacaggcaccggccaccacgcccggctaacgttttgtatttttagtagagacagggtttcactgtgttagccagggtgttctccatctcctgacctcgtgatccacccacctcggcctcccaaagtgctgggattacgggcgtgagccaccacgcctggccaaacagtgtgttattgacacataaataggcaatagactaatggaacaaaatagaggatcagaaatacatccaaatacgttcaggaattttggtatatgattaaggcatcatcttaaatggtgttgagacaattagccatgtggaagaaagattaatttagactcatactgttactacttactattattattattttaaagatggcgtcttactgttttatccaggctggtctcaaactcttgggctcaagcatgagtcactgtgcccagccttaatttggattcatatcttacagtgtacatcaggatgaaaccaagtatatcaaacatttaaatataaaaatataaaactataacattacaaaagaaaaaatgagggagttcctatatatctgtggagtggaaaaggtatctctaggctgggtgcagtggctcacgcctgtaaacccagcactttgggaggtcaacatgggtgaattacttgaggccaggtgtttgagaccagtctggccaacataggaagaccccgtctctacagaaaacataaaaattagctgggtgtggtgctgagtgtctgtagtcccagctactgggagactgaggcagaagaatcacttgagcccaggaagtggaggttgcaatgagccaggatcacgccactgcactctaccctaagtgacaaagcaagaccctctccccgctggccaaaaaaaaaaaaaaggccggatgcagtggctcatgcctgtaatcccacactttgggaggctgaaaggctgaggagggtggatcacatgaggtcgggagttcaagaccagcctggccaacgtggtgaaaccccgtctctactaaaaaaaaaagtacaaaaattagccgggtgtggtggcacgtgcctgtagtttcatctactagggaggctgagacacgagaattgcttgatcccaggaggcggtggctacagtgagccaagattgcagtcatgccactgcactccagcctgggcaacagagtgagactctgtctcaagcaaagatatttctagctatgagttaaaattcagaagccataaagtaaaagattgacaaatttgacagccaattttttttcaacttgcatgataaaacagaaaacaacaccataaggaaagttaaaagacagatggcaacctgagaaaacactttgacaatttaaaatgccaagtgttaatataaagagttcctagaaatcaagaaccactcagtagataattgagtgaaggacaagagctgagcgttgatatacaaattgatatgacacgtttaataaaatcatacgtttataagatcctctcccttatccataattaagaaaatgaaaatcaaaactatactgaagctgggcatggtgaggtgagaggattgcttgagctcaggaatttgaggccagcctgggcaatatggtgagaactcaactcttaaaaaaaagaaaagcaaaaaaacctatactgagatttcaggtctttccttttctaatgacaaaaactaatgtctgctgatctgaggtggaacagtttcatcctgaaaccatatccccactaccctgccccagtctgcagaaaaattgtcttgcacgaaactggtgcctggtgccaaaaaggttggcaaccgctgttaagcactagggaatacaggtgaataaaagaagacatagtccttttcctcatggaactaagaatctaacaggagaaagagacagttaacagataattacacaaatatgtgtaatgaaatgtgtattccaagtatgtctaataaaagtaataatgatagcagcagctaactcacgttagcacttactatctttacatgtaaagagtaaatatatgtaaaacagaagagtactaccattattattccgatttatagataaagaggttaaaggatgacaatgtttaagtgaattgccatgaaaggacttcatttagtctagggagatcaagaaagtgatattttaagcttagactatgggggaaaaatgcgttaagagttaaggtgaaagaggaagcacttgagagagctggaaagacattccaggctgaggtaaccctgtatgtccaatctctgaaacaaaagtttgctagaggaagaaaagggacatacttcagttccaggactaaagcataaaaacacacctaaaagtgtgtacaaaaggatgcacatacacacacatactattctcccatcagctcctcagctgttgtttctctactccctcccatcttgaagtcgtgacttttctgaaagcaaacagcagcaactacagtggcagatggtcctgtaatgaggggacaaggtgcagtcaacaacaatccctcatgtaagcacaggacttctataagcaggaattgtaggaaaaagggttcaatttcttattattttactttgttatctcagagaagtgatgctgtactttatgtctagcccacaaaaacaaataccttcgaattatgcaaaaaaagttataaatattactgaaaaatacaactggctttctataactaggttataatttttattaactttttgaaacaatcacaaataagttgcaagttcaatacaaagaacttttgcttttctgaaccgaataagagtaaactgcctacttgatatcccatcagctttgaatacgtcaatgtgtatttcctaaaaatatgaacattcttctacgtaaccacaatacagcaaaaattcaggaaatcattgatatattatagccaaataatcctcagatcccattaaaacttggcaagttgtcaaaataacatcctacagaacaaaaggatccagttgagaatcttgcattgcatttatttgttgtatctctttagagatagatctctcccatgcacagttcacaataggattcgaactcctatgaggatctaatgctgaggctgatgtgacaggaggtggagtgcaggcggtaatgctcacttgcccactgctcacctcttgccatgtggcctggttcctaacaggccatggactggtactggtctgcagccaccctctggcttagaacgcgtagtacttaaatacttttgttgactgatgaaatggtggttcgtgatagtggataagtcaagccaactgggttttgtctataagtagataacagatttactagctcttgtaaccttggtgaagttatttaacctgtttgagcttcacgtttctcatctgtaaaatagcatcgataatacctaccatgcttagtattagagaaaatgtacattaaggcctggcattttgttggtgatcaataagtaataaggttattaagatgtggcgaaggatgccaatagtaaaaatacccgtatttttatcaagagttgaaacatacatggaaatacctagtgaagtgcctgacttcaattatgttagcccctcatgttaactgttttctaataacaattataacgaggttgaatgcagtggctcacacctgtaatcccagccagggattactttgggaggccaaggtgggaggattactttagcccaggagtttgacaccagcctaggcaacataatgagacctcatctctacaaaaagtaaaattagctggatgtggtggcatacgcctgtagtcccagctctgtggagatagctaggatattataactattatatataatatgtattatacatgtgtgtatataaaatacacacacacacacacacacacattcccttaagtgttgttaggtagggtttttcttccccttaaacaaataacaaattaaggtttagagaggtcagttaacttgctcaaggatacaggttttgaactcacatctagttcttctaatatacatattttatacgtatatatacatatatatgtgcatatatacgtatatacgtatacatatataaatatgtgtatatgtatacatatataaatacgtgtatatgtatacatatataaatatgtgtatatgtatatacatgtatataaatacgtatatatgtatatacgtatatatacatattttatacgtatatatacatatatacgtatgtgtgtatatatataaaatactttaagttctagggtacatgtgcacaatgtgcaggtttgttacatatctatacatgtcccatgttggtgtgctgcacccattaactcgtcatttacatgaggtatatctcctaatgctgttcctccccgctcccccgaccccacagcaggccctggtgtgtgatgttccccttcgtgtgtccaagtgttctcattgttcaattcctacctatgagtgagaacatgcagtgtttggttttttgtccttgcgatagtttgctgagaatgatggtttccagcttcatccgtgtccctacaaaggacatgaactcatccttttttatggctgcatagtattccatggtgtatatgtgccacattttcttaatccagtctatcattgttggacatttgggttggttccaagtctttgctattgtgagtagtgctgcaataaacatacgtgtgcatgtgtctttatagcagcatgatttatattcctttgggtatatacccagtaatgggattgctaggtcaaatggtatttctagttgtagatccctgagaaatcgccacactgtcttccacaatggttgaactagtttacagtcccaccaacagtgtaaaagcattcctatttctccacatcctctccagcccttgttgtttcctgactttttaatgatcgccattctaactggtgtgagatatctcattgtggttttgatttgcatctctctgatggccagtgatgatgagcattttttcatgtgtctgttggctgcataaatgtcttcttttgagaggtgtctgttcatatccttcgcctactttttgatggggttgtttgttttttttcttgtaaatttgtttgagttctttgtagattctggatattagccctttgtcagatgagtaggttgcaaaaattttctcccattctgtaggttgcctgttcactctgatggtagtttcttttgctgtgccaaatctctttagtttaattagatcccatttgtcaattttggcttttgttgccattgcttttggtgatgtagacatgattaaaagaactagagaagcaagagcaaacaaattgaaaaagctagcagaaggcaagaaataactaagatcagagcagaactgaaggagatagagacacaaaaaacccttcaaaaaatccatgaatccaggagctggttttttgaaaagatcaacaaaattgataaaccgctagcacgactaataagaaaagagagaagaatcaaatagacgcaataaaaaatgataaaggggatatcaccaccgatcccgcagaaatacaaactaccatcagagcatactataaacacctctacgcaaataaactagaaaatctagaagaaatggataaattcctcaacacatacatcctcccaagactaaaccaggaagaagttgagtctctgaatagaccagtaacaggctctgaaattgaggtaataattaatagcttaccaatcaaaaaaagtccaggaccagacagattcacagccgaattctaccagaggtagaaggaggagctggtaccattccttctgaaactattccaatcaatagaaaaagagggaatcctccctaactcattttatgaggccagcatcatcctgataccaaagcctggcagagacacaacaaaaaaagagaattgtagaccaatatccctgatgaatattgatgcagaaatcctcaataaaatactggcaaaccaaatccagcagcacatcaaaaagcttatccaccatgatcaagtgggcttcatccctgggatgcaaggctggtttaacatacgcaaatcaataaatgtaatccagcatataaacagaaccaaagacaaaaaccacgtgattatctcaatagatgcagaaaaggcctttgacaaaattcaacagcccttcatgctaaaaactctcaataaattaggtatcgatgggacatatctcaaaataataagagctatatatgacagacccacagccaaaatcatactgaatggacaaaaactggaagcattccctttgaaaactggcacaaaacaaggatgccctctctcaccactcctattcaacatagtgttggaagttgtggccagggcaatcaggcaggagaaagaaataaagggtattcatttaggaaaagaggaagttaaattgtccctgtttgcagatgacatgattgtgtatctagaacacccctcgtctcagcccaaaatctccttaagctgataaggaacttcagcaaagtctcaggatacaaaatcaatgtgcaaaaatcacaagcattcttatacaccaataacagacaaacagagagccaaatcatgagtgaactcccattcacaattgcttcaaagagaataaaatacctaggaatccaacttacaagggatgtgaaggacctcttcaaggagaactacaaaccactgctcaacgaaataaaagaggacacaaacaaatggaagaacattccatgctcatggatagaaagaatcaatatcgtgaaaatagccatactgcccaaggtaatttatagattcagtgccatccccatcaagctatcaatgactttcttcacagaattggaaaaaactactttcaagttcatatggaaccaaaaaagagcccacattgccaagtcaatcctaagccaaaagaacaaagctggaggcatcatgctacctgacttcaaactatactataaggctacagtaaccaaaacagcatggtgctggtaccaaacagagatacagaccaatggaacagtaaagagccctcagaaataataccacacatcaacaactatctgatctttgacaaacctgacaaaaacaagcaatggggaaaggattccctgtttaacaaatggtgctgggaaaactggctagccatatgtagaaagctgaaactggatcccttccttacaccttatacaaaaattaattcaagatggattaaagacttaaatgttagacctaaaaccataaaaaccctagaagaaaacctaggcaataccattcaggacataggcatgggcaaggacctcatgttgaactcatatctagttctaaagcttttattctttttactttaaatttttggttagagataactggagactagtacatgtaatttttaacaatgcctttggtgatgttggtaactagaaaacattcagtcttcagtaaatgtgactttagtcagattatttgttctaaaaacctacctgaggtttgttaaatgaaagaatggacatactggtaactgtgataaagcactggaatacttttaggaatatcacagatgttggtggattgtaactttggtagttgtgagcagtgaaagatgtagagaagctgttggggaggaaaaagagaaagaggaattaaaaagaaatacatttttcttctacactagactgcacaaccatctggtcctaagttcattctctcattaaaattttatttattacattagtatattctcatttcgaaagaataaacatatgtatagttaaatctgaaagtctcatttgcatttctcctttcatccctgcatttctccccagaaaaataggttattttttataacagtgttacttacattaacttgggtttattgttgtatttaaatgaatgaataagtattttttacatggtctcagttttgatttctaatatgggaaaatattgataaatataacccatgtacacaaaagactcttgggatcctcgataacttgtaagaacattaagggttgttttgtttgtttgggtttttttttgtttttttttttgaaacagagtctcactctgtcacccaggctggagtgcagtggtgcagtctcagctcacttcccaggttcaaaagattcttgtgcctcatcctcccaagaagctgggattacaggcatgtgccaccatgcccagctaatttttgtctttttagtagagacagggtttctccctgttggtcgggctggtcttgaactcctggtgtcaagtgatccacctcctcagcttcccaaagtgctggaattacaggtatgagccaccaagccctgcccataaaggggttttgagaccaaataatttgaaaactactgcaatatattattacatcggtattaatgaacatcgtataggccgtggtaatctagaaaattctcaggatataataatgttggccagaaatacaaaccccacaaattttattatagttatgagacaaagaatagaaaatagtactggagaaaatacagcaaaatgccaatagccatattaatgttgtattttgagttatttcattcttggtttttccaaaggtttttatactttgatgaaatttgtatatggttaaaaatctgttaaaacatgagtggaaatatctgttatttcagaaactcggcagtgatgctcaagttaaagtctttgggaaatgctgccaactgaaacctggaggagacagttcttcctctttagatagttctgtgacttcatcttctgatataaaagaccagtgtcttaagtaccaggtaagatcattgatgtcatttatttattcattcatttataattagttttgaacatcatccagtggactgtggagatataatagcaattagtccttatcttcctagagcttgcattgaagctggagagacagataaacaattatgtttatgaactttgataaatcttagaataggagaagtagaaagctataggcatagattgcatgagtattttctccttatatttcccaattcagatttattgggttatcagaataatttcttattttacatacttttttattattgaaaaatgaagataaatatactaatacagtttcagttgtatgaaattaaagtatgattggaagtatacataatacacagttttatttctcaaaagtaatgtgacttcttgtaaaatatggaattaaacgtattagtaagtataatacataggaacttctctctaaatgtattacattttatataagatcagtatttggtctcatgcttagcaagtgtcatctgatgtaaatttatctgtgtcatccaagtttgcattaatcacaagtattttatatttactcagtatcaaaatagaatcttgactttttaattactggtaatgagatgattgtgttttgatggaaattgatctttatacctaatcaatgggacaagctatgtgaaaagagtctgaaattactaaactccacttggatttactgcacagttccccctgccttcttctattccatctcccctttaggcatgataccttaacaaatccataatagtcctgtgctatacaacaccatcatgacttacaccattttgcacaactttgaaagttttgtgatttttaaaaaattagccatgtgggccgggcatggtggctcatgcctgtaatcccagcattttgggaggctgaggtgggcggatcacctgaggtcaggagttcgagaccagcctgaccaacatggagaaaccctatctctactaaaaatgtaaaattaggcatggtggcacatgcctgtaatcccagctactcaggaggctggggcaggagaattgcttgaacctgggaggcggatgttgtggtgacccaagattgcgccattgcactacagcctgggtaacaagagcgaacctctgtctcaaaaaaagaaaaaaaaaattagctgtgtgtggtggtgtgagcctgtagtcccagctactcaggaggctgaggtgggaggattgcttgagcccagaagttctaggatgtggtgagttatgatcatgccatagcaacccaccctgggtgacagagtgagaccttgtctcaaaaaaaatatgtatatagggtggctggcaagatggccaaataggaacagcttcggtctgtagctcccagtgagatcagcgcagaaggcgggtgatttctgcatttccaactgagtgtaaacaaagctgctgggaagttagaactgggcggagctcactgcagctcagctaagccactgtagccagactgtctctctagattcctcctctctgggcagggcatctctgaaagaaaggcagcagccccagtcaggggcttatagataaaactcccatctccctgggacagagcacctggaggaaggggtggctgttggcacagcctcagcagacttaaatgttcctgccttttgactctgaagagaacagtggatctctcagcacagctttcaagctctggtaagggacagactacctcctcaagtgggtccctgacccctatgactcctcactgggagatacctcccagcggtggtcaacagacatcacatacaggagagctccggctggcatctggcaggggctcctctggaatgaagcttccagaggaagggacagacaggaatctttgctgttctgcagcctccagtggtgatacccaggcaaacagggactggagtggaccaccagcaaacaccagcagacctgcagcggaggggcctgactggtagaaggaaaactaacaaacagaaaggaatagcatcaacatcaacaaaaaggacatccacatgaaaaccccatccaaaggtcaccagcatcaaagaccaaagatagataaatacacgaagtgaggaaaaacgagcataaaaggctgaaaattccaaacaccagaatgcctctcctcctccaaaggatcacaacaccttgccagcaagggaacaaaactggatggaggatgagtttgacaagttgacagaagtaggcttcagaagataataaaggtaataaactcctgtgagctaaaggagcatgttctaacccaatgcaaggaagctaagaacctggaaaaaaggttagatgaattgctaactggaataaacagtttagagaagaacatgaatgacctgatggagctgaaaaacacagtacgagaacttcatgaagcatacgcaagccatcaatagctgaatcaatcaagcggaagaaaggatatcagagattgaagatcaacttaatgacataaagcatgaagacagaattagagaaaaaagaatgaaaaggaagaaacaaagcctccaagaaatatgggactatgtgaaaataccaaacctgtgtttgattggtgtacctaaaagtgacagggagaatggaaccaagttggaaaacactcttaaggatattatccacgagaactttcccaacatagcaagacaggctaacattaaaattcaggaaatacagagaacacaacaaagatactgctcgagaagagcaaccccaagacacataatcgtcagattcaccaaggttgaaatgaaggaaaaaatgttaagggcagccggagagaaacattgggttatacacaaaggaaagtccatcagactaacagtggatctctctgcagaaactctaaagccagaagagagtgggggaccaatattcaacgttcttaaagaaaagaattttcaactcagaatttcatatccagccaaactaagcttcataagcgaaggagaaatgaaatcctttccagagaagcaaatgctgagagactttgtcaccatcaggcttgccttacaagagctcctgaaggaagcactaaatatggcaagggaaaacggtaacagccactgcaaaaacatatgaaattgtaaacactgttgacactaagaagaaacagcatgaacaaacaggcaaaataaccagctagcatcataatgacaggatcaaatccacacataacaatattaaccttaaatataaatgggctaaatgcccctgttaagagacacagactggcaaattggataacgagtcaagacccatgagtgtgctgtattcaggagacccatctcatctgcaaagatacacataggctcaaaataaaaggatagaggaatatttaccaagcaaatggaaagcaaaaaaaagcaggggtagcaatcctagtctttgataaaacagactttaaaccagcaaagatattaaagaaaaacaaaaagacaaagaagggcattacataatggtaaaggaatcaatgcaacaatagggatcagtgtaacaagaagagctaactattgtaagtatatatgcacccagtacaagagcacccagattcataaagcaagttcttaaagacctacaaagaaactgagactcccacacaataatagtgggagactttaacaccccactgtcaatattagactgatcaacgagacagaaaattaacaaggatgttcaggacttgaactcagctctggaccaagcagacctaatagacatctgcagaactctccaccccaaataaacagaatatacattcttctcagcaacacatcacacttattctaaaattgaccacataattggaagtaaaacactcctcagcaaatgcaaaagaatggaaatcataacaaacagtctctcagaccaaagtgcaatcaaattagaattcaggattaagaaactcactcaaactacacaactacttagaaactgaacaacctgctccggaatgactactgggtaaataacaaactgaaggcagaaataaataagtttgaacaaagacacaccataccagaatctctgagacacagctaaagcagtgtttagagggaaatttatagcactaaatgcccacaggagaaagtgggaaagatctaaaattgacaccctaacatcataattaaaagaaccagagaagcaaaagcaaacaaattcaaaagctagcagaagacaagaagtaactaagatgagagcagaactgaaggagatagagacacaaaaaacccttcaaaaaatcaatgaatccaggagctggttttttgaaaagattaacaaaatagaccactagccagattaatgaagaagaaaagagaaaagaatcaaataaacacaataagaaacgtgttgatcccacagaaatacaaactactatcatagtttgtacacaaataaactagaaaatctagaagaaatggataaattcctggacacatacaccatcccaagactaaaccaggaagaagtcaaatccctaaatagaccaatagcaagttctgaaattgaggcagtaattaatggcctgccaaccaaaaaaaagtccaggaccagactgattcacagccaaattctaccagaggtacaacgaggagctggtgccattccttctgaaactattccaatcaatagaaaaaaaggaaatcctccctaactcattttatgaggccaacatcatcctgataccaaaacctagcagagacacaacaaaaaaagaaaatttcaggccagtatccctgatgaacatcaatgggaaaatcctcaataaaatactggcaaactgaatccagcagcacaccaaaaagcctatccaccacgatcaagtcgcctttgtccctgggatgcaaggctggttcaacatatgcaaatcaataaatgtaatccatcacatgaacagaaccaatgacaaaaatcacatgattatctcagatgcagaaaaggtcttcgataaaattcaacaccctatcatgctaaaaactctcaataaactaggtattgatggaatatatctcaaaataataagagctatttatgacaaacccatagccagtatcatcccgaatgggcaaacgctggaagcattccctttgaaaaccagcacaagataaggatatcctctctcaccactcctattcaacatagtattggaagttctggccagggcaatcaggcaagagaaataaataaagggtattcaaataggaagagaggaagtcaaattgttgctgtttgcagatgacatgattgtatatttagaaaaccccattgtctcaggccaaaatctcctaaagctgttaagcaacttcagcaaagtctcaagatacaaaatcaatgtgcaaaaatcacaagcattcctatacaccagtaatagacaaacagccaaatcgtgagtgaactcccattcacaattgctacaaagaaaataaagtacctaggaatccaacttacaaggtatgtgaaggacctcttcaaggagaactacaaaccactgctcaaggaaaaagagaggatacaaacaaatggaagaacatttcatgcttatggataggaagaatcagtatcgtgaaaatggctatcatgcctatagtaatttatagattcaatgctatccccatcaatctaccattgattttcttcacagaattagaaaaaactactttaaatttcatatggaaccaaaaaagagcctgtatagccaagaaaatcctaagccaaaagaacaaagctggaggcatcacgctacctgacttcaaactataccacaaggctacagtaagcaaaacagcatggtactggtaccaaaacagatacatagaccagtggaacagaacagaggcctcagaaataatgccacacatcaacaaccatctgatctttgacaaacctgacaaaaacaagcaatggggaaaggattccctatttaataaatgatgttgggaaaactggctagccatatgcagaaaactgaaactggattccttccttacaccttatacaaaaatcaattcaagatggattaaagacttaaacgtaagacctaaaaccataaaaaccctagaagaaaacctatgcaataccattcaggacataggcataggcaaagactttatgactaaaacagcaaaagcaatggcaacaaaagccaaaattgacaaatgggatctaattaaagagcttctgcacagcaaaagaaactatcatcagagtcaacaggcaacctgcagaatgggagaaaacttttgcaattagcccatctgacaaagggctaatatccagaatctataaggaactaaacaaatttacaagaaacaaacaaccccatcaaaaagtaggtgaaggatacaaacagacacttctcaaaagaagacatttacacggccaacaaacatgaaaaaaaagctctttatcactggtcaccagagaaatgcaaatcaaaaccatgatgagataagcatctcaagccagttagaatggcagtcattaaaaagtcaggaaacaaaagatgctggataggatgtggagaaataggaacacttttacactgttggtgggagtgtaaattagttcaaccattatggaagacagtgtgccaattcctccaggatctagatccagaaataccagttgacccagcaatcccattactgggtatgtacccaaaggattataaatcattctagtataaagacacatggatacatatgtttattgcagcactattcacaatagcaaagacttggaaccaacccaaatgtccatcaatgatagactggataaagaaaatgtggcacatatacactatggaatactgtgcagccataaaaaaggatgagttcgtgtcctttgcagggacatggatgaagctggaaaccatcattctcagcaaaataacacaagaacagaaaaccagcactgcatgttctcactcataagtgggagttgtacagtgaaaacacatggtcacagggagggaaacatcacacaccaggacctattggggggtggggggctagggggagggatagcattaggaaaaatacctaatgtagatgacaggttgatggatgcagcaaaccaccatggcacttttatacctatgtaacaagcctgcacattctgcacatgtatcccagaactaaaaagcataataataattttttttaaatgtatataatttcaggtaagtggaacattgtctttgagttacacagggtttaacagattattagcttccaggaatgagtacttagaatagaccttttaaataaggcattttaaaatagacaataatgataatagcatccttttaattataagcttcattgtagattatgtcacattaaaatacataccttgccagtcacattcatggtaactatttagtatatgttagaacagacaaagagaaccttagtagtaaactatatggtgtcataaaattcacatagcaatttattaatatttttactgtattttgctttctggggattattttatttgtataatagtaaaatctataaataaatgccttggtatttaaatttgtatagcttgcttaatacaagaaataagaaattcagtcaaaataacaatggagttagacacattatggtaaaaatgagcttataagggaaggctgccatgtctatcattagccagaagtaatttaggttgccaagtaatactggcattgattttttaaatagctattttatcattaaaaaaattttctgctccttttctgaaatgttgttctcagtacccaagcctctatgtcttaaaataaaaatttgatcttaaccaaatctcaagaataaattagttgctttgtatattagtaacctaggtatgacagaaatgacttttttcttaaaaattaactttgtgggctgggcgagttggctcacacctgtaatcccagcactttgggaggccaaggtaggtggatcacgaggtcaagagattgttatcatcctggccaaaatggtgaatccctgtctctactaaaaatacaaaaattagctgggtatggtggtacgcacctgtattgccagctactcgggatgctgaggcaggagaattgcttgaacccaggaggcggaggttgcagtgagccgagattgtgccattgcactccagcctgggcgacaagagcaagacttcatctcaaaaaaatgtgaaactgatataaaaatagccatgtattaaaaaatgtgttgctacttgaaggtgtctttttaaagaaaagtacaaatatttaaacgtggattatcttaaccctaataataggacaatttaagataggtagtaaagagataaaggagtaaaagagtcacatgataaaacgaaaaacagtgtgcagctgtatatcctggtctccagttgtaaaatggggattctcttcactttatggttattagaattttcctaaatattttagaaaccatttattttttgattttatataattgcatcagttaagaatggtattgggacactctctaaacagtggcttaaacaaattaggggttgcgttgctgacatacatgataaccctaaaagtgtactatctaggtatgatactgggcttccagataccctcagagaccatggttcccttatctttctacttagagttagtgtgtacttgttgcattgttgttataatatgacatctccatctgtagtgacttccatttacatcttactgaccaggcctgtgtcaaatgcatgtaaatgaatagttctgaaaattgctacttcaaccataacactgatcttttaagtataaaaattattctaaatctcctatcttcaagtgaggctgtgaaatgaaatttttttcatttgtgcacattactgccctaaaacaaactggacttcaaaaaatgaggaagaattagagaatagatacttggtaggtaaaaagtgatatttgccatgatatctaaatagtaaccaaatggataagctcaatctttaactattgtctgactcctgtgaagacaaagaataatgaaagagaataactttttaatcaggaggttctttggaaacaagacattataatgtttcaaggaagtcttgctctgtcgcccaggctggagtgcaatggcgtgatctccactcactacaacctctgcctcctgggctcaagcgattctcctgcctcagcctcccgcgtagctgggattacaggcatgcaccaccatgcccagctaattttttgtatttttagcagagatggggtttcaccatgttggccaggctggtcttgaactcctgaccttgtgatcctctcgcctaagcctcccaaaatgctggtattacaagcgtgatccaccgcgctagcctcaaggaagtctttaaaaaaaaaattgtgggaagaacatgagatctaccctcttaaatttttaagtgtacaatgaattgttttctacatgtacagtgttacactatagatttctagagcttattcaaattgcttgactgaaatttaatgccattgattagtaactccccatttccccctcaccccagcccctggtaactaccattctactctttgattctgtaaatttggctattttaaatacctcatataagtggagtatttatcttatcatgcagtatttatctctttgtgactggcttatttcatttagcctaacgtccttaagattcatccgtgttgcgtgttgcagaattttcttctttttgaaaactgaatagtgtttcattctatgtatttattatatttcatttatccatgcatctgtcagtggacatttagggttattttcacatcttggctattgtgaatagtgctgtaatgaatataggagtgctaacatctctttgagatcctgattttaattattttggaaaaatgcccagaagtggaattgccagatcacatggtagttctatttttaatttttggaggacttgccatgttgttttccataagtacaataccattttgcattcctacaacaatgtgcaagggctccagttttcccacatcctcaccacttgttgtctttgcttttttgattatagccaacctgacaggttttgtggttttgatttacatttctctgattagaaatgttgagcgtttctcctgtatcagttggtcatttgtatgaattctttggagaaatgtttattcaagaccttaattgcgttattagtttttactatagagttgtaggggtttctggtacattttgaagccaaatcccttatcagatacatggtttgcaagtattttttcccattccatattttatcttttcccattccatattttatctttttgccctcttgattattttctttgctgtgcagaaacattttagtttgatgtagtcccacttgtctgtttttgctgttgttacctgtgctttgggtgtcatatctgtgaaattattgctaagaccaatgtcatcaagcttttctcctgttttcttctgggagttttacagtttcaggtcatacatgtaagcctttaatctatattcagttgatttttgtgcatgatataggacaccagttttattctttcgcatgtggatatccagttttccaagaagcatttgttaaggagactatcctgtccccattgtgtattcttagcacccttcttgaagataagttgactgtatacatgtaggtttatttctgggctgtttgttctgttccattggtctatatgtctgtcttaatgtcagtaccttactgttttcactactgtagctttgtagtataatttgaaatcaggaagtgtaatgcccaccagctttgttctttttcaaggttgatttggctgctgcttcttgaagaagaaggttgtggtcttctgtggtttcatgtgaattttaatatgtttttctgtttttgtaaaaaatgccattaggattttcataggcatagtattgaaactgtagatcacagatatgtctttacagaaatacaaaatagatataaattgccccatttatggatgcttcttatatacaacaggagtagtaaaaattattctgcatattctttgaatttcacttattatctatcctggagaaacattgcatatgcataagatgtggttaagaatgcctgcttttgcattattggtaatagcaaaaatctggaagtgacttaaatgcccgtgagtaaagggaactggtctgacaaactgtagtattttcatacaataaaatattgtacagctcttaaaaggaattagtcaaatttatgtgtaacaacatggttacatcaagaaaacattttaaaaggaagaaaatcgagttgcagaacagcgtatacagtgtagaagtacaactcttaatgtagaataactatatcaagaatttttaataaaaatcaacatatgaaatagtcataagcttttaattaacacagtttgttaatatgtggttattgtttagggttctcggtgctcttctgatgccaatatgcttggagagatgatgtttggctcagtagcaatgagctacaaaggatccaccttaaaaattcatcagattcggtgagaggttttctgatttttttttaacgagtcccatttttagatattttcgtttttttagagagaattttatatgatcttcactcagattgagcttgtcatactccatttaacatgttctatggttttaatgctacttcatggctcttgcagctatgctgtgaaacctctgtgacttacacatttttatttataataaatccaaaaggtcattatattttagttttggtctctctctttctctttttcttcatagttcccctccacagctcatgctcagcaaagtgtttactgctcggactggcagcagtatttgtgggagtctcaatacgtaagtgcttatggatacagggggaaatgtatcactttagatgtgcaaagtatgaaaactaaccaactgcttttaggactgcagcacaagttcagattttctgtctttccttaagtttaaaagttcatggaagccagatttcactcttaattgagtttagttgagaaacatgagatgtggtttctgtttctgtgaattgctagaagcagtatctggaagtagaatgttgaatggatttccgtcttagggcaacatgctgatttttcagttttgcggtaccacgctgagttacctgagttaccacaatctgtagggttggtgctcttcaattttcagatcccctacgaaattaaccctaaagacaggactgacctaggtcagccatactgatattgcacatatacactatataatgatagccaccagggtattacaagctattaatgcaaagattagaatagtgaagctgaaacaaaggcaggcctggtgtcaggatcatgggccatgtgccagaacctagtaaattactggggctaaagttaggcagtggaagaccccagagagagattttgcaggtgccatatcagagcaagactcattggctagtcagagcccctgggggtaacccaaggtcaaaggcagcaaggaagctactccagactacagaaattctgtagagcccccattaattgttaatgccttaaaaagacctgtttggaagagttttattagctaagtttctaatacctgtaactctttggaaggaaagtgggaggtagtctttttttttttttttcgagatggagcctcactgtgtcaccacggtggagtgcagtggcgtgatctcagctcactgcaacctctgtcctgggttcaagcgattctcctgactcagcctccagagtaggtgggactacaggcgcaggccaccacgcccggctgacttttttttttttttgtatttttagtagagacagggtttcactatgttggccaggctggtgtcaaactcctgacctcaagtgatctgcctgcctcggcctcccaaagtgctgggattacaggcatgagccaccatgcccggccatggggggtatcctttaaaatattatggatgccttaaaaaatattgaagccaaaaatactgatttttaaaagtagaaattagagatctactaaagtagaaattaaagattccatgttggaatcactgatgttagccataatcaccagagttttttcaccttttctaagttctgataattcctaaaatctctagaaaggatattttgcactaaaagcataaagtacttttatttttcttatcctgaaagagacactaaaagaagtgatataggttatttgtaatatattacagtaaagatagtttttggatatttgcctaatgatttattctcctcttcttcctcctagcttccacctctccctaacagataattagaaaatatttttaggtctaaaatatgaggggaaaccttgtttgtaatctaaatcaggttcagcaacttctactttaaagatccagatagtaaatattttttggcgcaaagacttggaaccaacccaaatgtccaacagtgatagactggattaagaaaatgtggcgcatatacaccatggactactatgcagccataaaaaaggatgagttcatgtcctttgtagggacatggatgaagctggaaaccgtcattctcagcaaactatcacaaggacaaaaaaccaaacaccacatgttctcactcatagatgggagttgaacaatgagaacacatggacacaggaagggggacatcacacactggggcctgtcgtggggtggggtgaggggggagggatagcattaggagatatacctaatgtaaatgacaagttaatgggtgcagcacaccaacatgggacatgtatacatatgtaacaaacctgcacattgtgcacatgtaccctaaaacttaaaatataataataaaaaaaaatatatatatatttttttggctttgtgagccagacaatgggttgtagtttctcagctctgctgttgcagcatcaaagcattcatacacagtatataaatgaatgggcatggctgtgttccaataaaactttatttacaaaaagaggcagcagactagatctggcactccaggctatagtttaccaacctctgatttaaatgattatgttagttaatttgtaatgctaataggaagaaactgtttttgcacttaaaatttcatcaggatgtacaaagaattgtccttaaaccataaaatgaatttggaattaattttcttctcaccctccataggctacaagatagtcttgaattcatcaatcaggacaacaatacattaaaggctgataataacacagttattaatggactgcttggaaatataggtaaatggttcctttgattttataagtttaaaaaatactagcagggtaacaagtgttttttgaagttattccttaataatgcagatctgtcatgataacaaagaatttcaaatactgtaagtggaagaggcatttaaattgccagtatgtataacatttatttggaaaacatatttttcatatatttgaacacaatatttattttgtatctgataaagagtactgctgtagatatatctaatttgtcttcattgtttttcgttgttaaatttgatgcatctttgaaaggtgtcagtgataagaaaagcccttagtagttcttttggctatttcagctgaggaagactattacaccttcttccttctgtcttccataaccataaaagttattttaaaatgatgcttgtttttgtgacctgtaactcagatgagcagatgttcaaatttgatgtttcttaaaagatttattagaataacaatttatttagtactttggttagctgattgttgttatttaagtaccacattttaaagtgacagactttctaaaatttctggtcattttttctagacagctcaactgaactgctgctgtattgcgatacttctggtgcataaaaagctatgtagtagccaagggaatgggatagcaattagaatagtattaatatttcttccattttctgtttagtaagaacttttatttataattaattttaataaatatttgttatatattagtagaaaagttttttcttccaacttgaactgtatgacatcctattatttattttttataatttgtgtttattcaaatgagcaatcacttataaaacacctattactgtgggctagtcatagtgttaggcatatactttataatgtgtgtgtgttatagaaaaatagaagttctgcattttcttaactcgtttgattacttcattgattttaataaaggaaaaatgtgacaaagaaataacgaaatctcttttctttataatttgatacttttcaaagctcaaggggcttgttgaaagttgaaagtaattatgggttttttttgtttgtttttgttttttgatatggaatctcactctgtcacccaggctggagtgcagtggcgtgatcttagctcactgcaacctctgcctcccgggttcaagcgatcctcctgcctcacccttccaagtagctgggactgcaggcacgcgccatcacacccggctgatttttgtatttttaatagagacagggttttgatgtgttggccaggctgttctcgaactcctgaccgcaggtgatccacccacctcagcctcccaaggtcctgggattacaggtgtgagccaccgtgccccagccaaaaggaattcattttaacaacacaaatccattattacttataaaggtaaattatactatagaggttagatatacttgtcttcacttttaatatagagtagaaaatccattttacatactactgactttaaataatgagcaacatttacttgcactcttttaattgtgaatcaaggattttttgtgtgtgtgtctaccatttcttattttctttcaatttccaatcaatcagtcaatcaatcaataagtatgtggtgagcacctgtaatataccaagcactctgcttggccctgaagatgcagtggtgaaccagacacagttcctgcctcaatggatttatagtgagtggaagtcagaaaagtaatacaacaattacagtatactatagtaaattcttagagttaaaagcagtgtgtgattaaaataaggagaagcactcaattcagtcctggagagtcaatgaaggcttccttgaggacatgaggcttaagcttgaaggattagtcagatggttaggggaagaaatgttctatgaagaagcagtggtacgtacacagacctaggggtaagagatcatagagtatggaaagaatgtgaataaatcagtatgtgtggagcacagagtaggggtaaagttaatgaaaaagaaagaatggagcaaaagctagatcacaaaacacactgtaggccacactgaggaatttagagttaatgcttggtgtagtgtagttgggcaccagtgcaggtgtgttggttcgggtcctttacctgttttttttaacggtttgccaaagacaggattaaacatgcaacaattgtattaggggaaatgactatgtaaaggaaaatgaggaaaatgctgggaaaggctgagagacccatcgaattgtgatgtaagtctgaccatgaatgaaggagagaggggtagaatgttgactggaagtgtctcagcccgctatacagttcaagggagggttagcaaggccctgggaagtatttgagtcaaagttggttgtcagaagtgtcccatgtctccccaaaatgggcctgcctttgtatacctactgtgttcagccattggctgggagcagcctatcagctatgtgtccttgcacaaatgtggcaatagatttcagcaggtgttcttaatcaacatactctttatagttggagatctttgacatatattctcgaggtcaccacagaggaatttttggaatatagcaacacagattacatttgtatctgtagaagaatattctaactgcagtaggaatggattcagataagtgggattgagaaaaggcccatattagaaggctgatcatgttactccaaatgacagataatgttacctacagtaaattagtgtcagtggggatagttgttgagaaattcgctaagggacatagagtggaccagattagctaattaaatagaagaggtgaggcaaaaggaagaatcaagtttggcactttgctggctgtttaattgcatgtatattggtgctattcactaagggaaatagaagaaatcagaattgatgattttaggtttaggcatgttcagttggaagtactggaatatccaagtgaagaaatccattgttgttagctagttagataggtatattgtagggtattctctttaacataaaaatggatgagtgtttaataatttaaaaataatagaagttgaccagttagttgtatcttctgtggatttgagaatcatcaggacataaattataattgaaagcacgggaatggaggatgacctaggaaatgtaaagaatgagaaggaaagattgttgaagatggaaccctggggaatgctggctttaagaaggggtacgaggccgggcgcggtggctcacgcctgtaatcccagcactttgggaggccaaggcgggcagatcacgaggccgggagattgacaccatcctggctaacatggtgaaaccccattcttttgtaaaacacaaaagaaaattagccgggcgtggtggcgggcgcctgtagtcccagctacaggctgaggcaggagaatagcgtgaacccgggaggcggagcttgcagtgagccaagatcgtgccactgcactccagcctgagcgagactccgtctcaaaaaaaaaaggggtaggagaagagaggcacacagactaagactgagggggaaaaatacagagagtgtgttacatgggaaaaaagtttacagtgtaatataatcagcatcaattactgctataaggtaatataaaataatatggactaaattaagcaacaggaaggcttttggtggcctagatgagcagtttcagtggggagaatagacatcagaatgggacgactcagggtttggacttttgtccaagatgcaagcagtcgttctcaaactttttggttttaggaaccctttacacacttagaaattattgaggactgcagagaacttttgtttatgtggattacaactactgataaatactttattagaaattacaaccaaaaaattgaagaatatttagtaaatccttgaaaaattacactaataccccctttcatgttattacaggcctccaaaaaattagtaagaagagtggcattgttttatatttttacaaatctccttaatttgtggatgaggatacagctaaattctcatatctgcgtctgtattcagtcttttgtgatattttcgttgaagtgtatcaagaaaatcctgtctcacacagatatgtagttggaaaatggaggacttcgcagaccccctgaaagtctcggggacccaacgggtccttggatgacattttgagaactgctgaactgctgtaggattagatatatggagggtggtagaagagaattgattgtgtttaagtgttgacagaataaggaagttataaggagcatgaaattaaagactagaagtagtaattgatagaaggaggtttttgaagaagaatgggggattggggtcctagctgacttagagttaactttggaagggaggaaggaacttaggattttttaataagtcactagcacattgtaaggcttgaataacatgacagcttaggcaggaaggaggcaaggatggatgagagagtaagttttgaagcagggtgataggaaaaaaaagggttccaatctggttaattctactgtgtgtatgtgcatatatgcatgtgcatactctaggaaacaaaagttttatgctgagaagaagaggtagggaaggagtttgaagaagtagataatttttaaagtaacgagggaaagaaagctaggacgaattaaaaagctgaccattgagacatggaaggattgctgtacatgtgctgtaattatagaagttcttgctacagaaaaataatatctgttagcaatttgaaaactacagttggctggatacagtggctcatgcctgtaatttcaacactttaggaggccaaagcaggaggatcacttgaccccaggaatttgagatcaacttggcaatgtatcaagactttgtctctactaaaaagttctcaaaattagctgggcctggtggcatgcacctgtagtcctggctcatggggagggttgaggagggaagatcactggagctcaggagttcgagcttgcagtgagctatgattatgccattgcattccagcctacatgacagagcaaaactctgtttcaaaaaaggaaagaagaaacatgcaattgtcactttttaaaacagaaagccccgtattccatcctagttaaatgtccttcatggctatttagactattttcatgaagcataactaacaggtaacccagctgcttgctttcaggctataatgtccttcttgggtcttcagactgcagttaccttttcttgatgaagcatgtggcagccacttctcttgaacagctgggagtctggtccctgatgagcttcatttgtgttcctccttccacagtggctgactcctggtttagtaaccttggtttcttccattactttgtaacttacaactgggttagaaaaaccaatttttaatttgtcagtaagatctcttctggttttgcaccctgttgtatgctgtgtgccaagtgcttaggtggttttctcctcgctgcagttgtaggcacatactataatcttcaaacaactttaaaaaaatgaatttatttggcaaatatcagattagatagataacattatcgtactttttcaaatctttaaaaatactgctttacattagaaaggattgaacatttaaaataatttttactttatatagcagaagcttgtttttattacatatagatttattagtaaaaatacatgaagttgttgtttcatataaatcatggctaaagaaacaccatcctgtttcaaaaatgggaaagacagcttgaattcttatttagtttaaaagtttccatccatatttgttggtctgctcttgtgctgccttagctcaccttttttccctgacgcattgtggcttctctaacagtcctctttcatgtgtattttacgtttttgccatgtaggtctttcacagttctgcagccccaggcgggcattctctgagcagggtccgctccgcctgatcaggagcgcctctttctttgcaggtttgcgatgtgctgtgtgggtagactagttggtgtgccccaacggctagaatctgtagttaagctgtggaaacaagagagtagatgaatgcagttggtgaggttgtggttaagaaaacattgcattaggaagtataaaaacttaattccttttctactgaacatgttcttaaagtttccagacaccggattatcagtagaattgacatttttatgaaatttcagtttgtcatttctcttgtggcataatgattttaacttcagaatctgaaaccaaaacttaatatgaactttatttcttatgataccacttggaatttttaatgtgacactgtcttgtttccatggctgagtagcttttgtaccatagttcaccaattgcagaaaattatcctatcttgttattattgtaaaatttctgatctacactattccataagagcagtttttcttggagctaagatttagatgaacaagcactactataatgctctgtaaaaggcatatatgactatatttgcttacataatcaagttgatgattgtagagtatgttcatgtgtatatatccaggattctaatcatattccttgttttcacacattttagcggattacctaacattgtaaccttttagtggaaattactggaatgtgaacacatttactcttcattgttctcagattggtatcaatttagcccttcttgttttgattaatattttctttccctgtaaatattagatataaaaaatatatatttgtagaaaacttggaaaacacttttaaaaggcaaaaatatatattagccattttatcagccagaaatacctgcttttttgttttttaaagaaaatggggatcatactattcaaataaatatctcaatttattatagagaattttgaaacatacattgttataggcagaaacagtacagtgaactatgatatacccaccacttggtcccagcaagcactcatactgttcagtagcttgctttttttcatttaatagtatattataaatatgtcactgaatatgcttccaaaatatgacttttagtcactccttgcttctttagatattatgttttagattcttatactgtgtatcaaatcttcacagagctctcaaagcttgttcaactgagtaatagctcttggtgttgggttggtgccatgctattgaaaaaaataagggaatgcaatgagatgagcatgatttcgtttgctatttaaaaggagctgttcatccacctgaatagcaatatattttataactgacagtttcatctttatttatagttcacagcaacccaatggacatgcctggaagagagctcaatgaggacagagacagtggcatagcacggtctggtaatgtcacgttcttgtattcagttttttatgagattactgttggcattgattttcttttttatccctccctttattatcaaatttgttcatattgatattagccttacaagagaactgtgaaaagaccagagcaaagtcttataaatttaatatttttcatgtttacttttaagtgtgctaagtaggataaagccaggatgaagtaaagccagagtaaagtacactggttgaagcttagtgaatataagaagaaaagcattggtcagaaaaactgcttagaaactgtagtaaaaaaaaaacacgtttgcttatatttgcttgctgctaactaaagtttaaattgtcatattgtctcttgcccagaaaagcataggcattttgaatcaatgttatactttttttttttttccaaatatggacctgtccaaaatttgtaggtctagcaaacatttattgaaacatggtggacattaaaaaaattaaagcccagagtctgcccttacggaacacagatgtatggagtctactgggagaaaaattaggaaaatcatctgtcataggtcattgtgtgatgcatttagtgataggcctgcgcaaaaagcttcagcgaaagagcaccacacttagcctgggcaaggggcagggatgccaacaatgctttacagaaggatgatgattgagttgtattttgagaaataaatagcagttatccaggcaaaagctcagaaaagcattttagctaaaaggaaaagtgtttgttggggcccagagagcagcataagtaaaaggaggagtaattttaggcttgaattactgttagatatgagaaacttaattcagtgtgatagcatgtgttgttacattatatggctctgctatcgaaattgttttgtaattcagttttgagtataaatgaaaaatctaaacttgctgtatattgcaatccctaggtatgtattagaataacaaagagaagttttataaaaaattcaagtgcctgaactctactttcaaagactctcgtgtaacctagagaaggtatctctaggcatctgtatttgtgaaacaaaacaaaatgcaaaacctaacacttgattctaatggatagctagggttgccgaccactactctaataagagtagcttgtgtttttcaagtaatctcatctttcttttctaattgagtttcttatttttgttttaaagaatctagagtttatttcttttaataaactttgcttcgatgtaatctagatatttagtcttccctggcaggaatttaattctcattattttatttaagatttaagtataatttatttatacttacattctttgtaagttgaagcatctggctagactgatctgttaggctgcttcaagttattggattcatatatgccatttaagttaatgtgtgttttcttttttttctaatagggttatttttaatattagaatgcagtgaaatgtattttttccaaacttaggacagcattttatttttcactgaagtcatacccagatttagttgtacatacccaatcttggactacaagagtttataatactaattgataaaatgtggtctgcatttagaatctgcattctaaagtaatttagaatgagttcattgatggtctacatgtttgcatggcacatacagctttatcctctatcattgaatttgtcagaattcaaatgaatagatcttcataatgaaagtgtctcagtttttagtgctggtgtccaaaataatttatcatctggcctgtacctttttaatagtgatgataatggttccctgttttgaatatacattttcagtatgtgcttatgatcatgaaagatagaagtctggaatattgccaaacaaaagcaagcccttaatggcaagtgttatcctctctaaatccagtggggaaaagcctgatgaaaatctcctagcctaatgaaaaatcagcagttgtagctcttaacacctcaagcaataaacatatcttacagatttcacagaagtgtttcgggaagggaataatccatccccaagatcaggggattgcagccgtgaaagagtggagtctgctggaatgtgtttgtcaccttagatgctccagggagcattctttttttggagcttagtaggtatagtcatgattcttaattaaaagtggtaggtttgactacatgtgcacatgtgatccatgaatacttgtaaatgacctctttaaatgccattcagacacttattttcaatagcttgttcttaaaatccagctgctgcattaagtttgaatagcatcagatttcctttaatttaagaactaaaaggattcaactgagttaggggacagtcaatccagtggccaaagggataatgccttgttgcaaagtataattttcttctggagtccctagaggggaatgccaaaaggggattgtctcagagttttttgctgatacattgttaatatatgatttttctcctctgagaccttgctacaagaaggatgtgttcttttaatgaacatttttgaggctcatgaagcaaaataaagtttaacttaacctatttgtaattttgttaaaaagaaatttgtcattatgcttagtcattattgacttatacttgttgttcttctgacttaacagcatctctcagcagcttgctgatcactccatttccttccccaaactcctcacttacccgaagttgtgccagcagctaccagcgacgttggcgacgcagccaaacaacaagtttggaaaatggggtatttcctagatggtaagttggaactttaaacacagaacaagattgagtagttccttaaacacaattttatatgggttttttagaacctggacttgtattctgtgtattttaagtttgaaactgaaaacttttaaaatttactacatttttaaaattgtggtaagttatacataacaagttacaattttaaccatttttaggtgtacagttcagtgacatttgtttaaataccttcatattgttgtgcaaccatcatcaccatccaactccagaactttttcctcttcccagctgaaactctgtatccattcaacgtaattcctcatttctcccttttcttcctcttgtaaccaccattctattttctgtctttatgaattttcattcataccttgtatgaatgaaatcatacactgcttgtccttttgtgtctgccttatttcatttagcataatgttttcaaggtttatcgatgttgtagcatgtgtcagaaattcattcctttttatgactgaataacattccgttgtatatacataccacattttgtttatccatttgtctattgatggacacttgggttgcttccacttcttaactattgtgaataatgccgctctgaacatgagtgtgcaagtatctgttcgagtccccattttcaatacttttggttatatatccagaagtggaattgctggatcatatggtaattttgtttttaaatttgtgaggaactgtcacgctgcacactgttttccatggttactgtaccattttacattcccaccagcaatgcacaatggttccaatttctccatatcttcaccagcacttattttctgtttttttgataatagccatcttaatgagtctgaagtggttcctcattgtggattttatttgcatttatctaataattagtgaagttgaacatcttttctattcttttcttttctttcccttttgagtcgcccaggctggagtgcagtggcataatcccggctcactgcagcctcaacctccctgggctcaggtgatccttccacctcagcctctcaaataactggaactacaggcttgccaccacacctggctaattttttttttttctttttttttagagatggggtttcgccatgttgcccaggttagtagaacttctgggctcgagtgatccacttgcctcagcctcccaaagtgctaggattacaggcatgaggcaccacatctgacttgatcatcttttcttgtgcttattggctatttgtatatcttttttggagaaatgtctatttaagtcctttgcccatattataactgcatttttttgctttgttggtgatgtctggaaattctgtatatattttagatattgatcccttatcagatatatgatttgtaaattttttttacattctgtgggatgcctttttactccattgatagtgtcctttgatgcacaaaaggttaaatttgtatgtagtccagtttatttttttttcctttgttgactgtgccttttgtgttatatccaagaaaccattgccaaatcagtgtcatgatgcatgatgcctttaccctttgttttcttctaagagttttatgtttaggtctttgatttatatactacatgttttgatatttcagtttttcatgtttttattttggcaaggtaattcattcttgaaagattagtttttaatctacattaagtacaactgtagatactaaaagttcttgttttctcctcttttttatttcctttattccttcatctttgactttactcctgaaatcaaaaacagacaccagaagggcctagaacagggaaaagattgtaccagactcatctataaatcttaaaatttagccactttttggttgattatgaattgggattatctacttctttagttacttctaattggacaaaaaaatgttcccaatctgactctgtagtaaaatttcttacaagaacatgaacctgaaagaatagccagtagatttcttaaagagatatacaattggtatgaaattataggtttgtttgataaaacagcaaaagacttagcttacctacatttaattagcaagaagattaaattgtgaatttatttttacttttgtaaattaataaaaaatcatttatttttaaggtctatagaagaaagctttaatctctcagatgaaagctgtggccctaacccaggaattgtgcggaaaaagaagattgcaattggggtaatcttttcattgtccaaagatgaagatgaaaataacaaatttaatgaattctttttttcacattttcctctctttgaaagccacatgaacaaattaaagagtgcaatagaacaggtaagcatagttatttatttatgtattttccttttaaaatcttattctcccaattaagcattatatttattaatttggcagaaaaattaacagacgttgtgcatgtgtcctataaagtgctctggtggatgcaaatagattgaaccctttttaaggtgcttactgtctagtaaaagatataagatcattcatccatttgttctgtaaataaatatttgagggactaaaatgtggtagacaccgttctaccaactaaagagaagtgataaaagcaacacttctgacctcatgggacaaataaacatatgaatatagatgtatgtaataagtcctgtgaagaaaaataaaacggagaacggtatataagggatcctgcaaggaaggattactaatttttataggctagtcaggaatgccccttattaaaggacatgtgaatgtggtccagaaatacggagcaggtgagctacaaccatctggaacgagatattccaggcaggggcaaaggccttattgcaggagtaagcctgatacttaagcagcattacgaggccaaggtgcctaggttgaagtgagactagatcatgtaggaccttataagataccattgtaagaacattagcatttattcttacaaaagtatgaaagatgggaaaccattggagggttttcagtggaggaagaaggacattatttatgaggatcactcttactgctggtggataatagatttctaggagcaaaagtagatgttgtgagaccaattagcatactgttacagtaatccagatgatgaatacgcaaaccactttagtgattgaattggtaagaaagagttggattctagatatattttgaaaacagccagtttgattagctggtagactaatcattaaggttgactctaagatttttttagccaagcagttaaaaggatgaagttgccagcattgaagtgagaaagactgcaagcgaaacagatttgataaaggaagatgggtattttatatttgcatatggacatccttgtgtttttatgagtctggagtttaccagagaagtcatcagtgtatagatggtatttaaagccatgaaactgatggagattggcaagagaggacaggcaatggtaagcctgagttgtggtgcattttaacattaagagtttgacgagatgagaaggaaccagcagaggcgaaggaaaaggattggctattcaattaggagaaaaaacaagagtgtattcttttggggaaagccaagtacagaaagtatttcaaggaaggagtgatcacttttgtcagttgctactgagatagtatatacgatacaaatatgtatagtaaattgtgaaatattagaatctaagctaaaaaggaaggacaaaggttttttagaaatttgggggaaagtgaaatgacttcctattgggaagaagtttcatttggactgcattttgaaggatgtatgggatgttttggaacataaagctctgaaaattggatatagcagaatagcaagaaaatcgacattcttgccacccaaagggaacacagtaactcattgctgaaaaatcttatttaggccttttttatgcatattgtgcttttacttggtagggattgtgctgtgtctacatttttcaaattatatgcccatttaaaaaaactcagattgagcaacatggcaagacccggtctctacaaaaaaaaatttaaaaattagccaggcatgggggagcacactagtagtctcagctactagggaggccgaggtgggaggggtgcttgagctcagaaggtcgaggctgtagtgagttgtgattgtgcctctgcactgtagcaacagagtgagtccctatctcaaatagtaaaataaaaaacatcattgtcacatacacatttctcaagttattgtaaatggttcttacatatattttagtaggtctcctcaatttaagtaacagtttccctgttaggccatttctacttttgcacaattgttgctaccctatcgttaacatcttggcgaattttccagattattttttagaggagattcccagaagttgagctgataaaatcagtggctgtcaccagagttttttgcaacagtctgtggaagggaaaggatacaaagaggaatagtgagaggtacaactggcgaagttaatgagtacctgatgacaaaaaatgtagcgtgcttgccagggagttctgactttgtctttaaggctgtttgcaagttgtactttggggagattaacttggcagtgtgttttgtatatggctgctgaaacgagcacttggtagtgcgttttgaagagactggagtaagagacgagaggtgggtagacccgttagaatggtttagaaaggaaaggatgtatctcaataactcattagtgactaaggatgatctgcctttagagaagacatagatgttagttattcatattgagtatgtcaaaaaataaatagttcattagcaatacatttttattgaacaaatgagtaaaggccattttcatttaccttttcttaagttagacactgattacatttcttcaattggctgcactcacattttgtagtctagccaaagtcatcacacacagtaataagttgtgggtgaactgacatttttagttatttggagaagtatttcaaactttgtataaaacttgaaataggcattatagaactcattaaagattacttttcaagtgttttcatgttttaacgctttgataattctgtaacctaaagcagcagtccccagcctttttggcaaccagggaccctttgtagaagataattttttcacggatggggctggggaggtggggagttgccatggtttcagaggcattagattctcataagagtgtgcaacgtagatcccttgcatgcacggttcacaatagggtatgcgctcctatgagaatctaatgctgccactgatgtgacaggaggtagcgctcaggcagtaatgctcgctcacttgcttgctcgacccaattcctgacaggccactgacgggtactggtccacggcccagaggctggggaccccgacctaaaatgtacattgttaatgcttatagttgtttggatatttgttcaattgtagtatcgcattttttattaaagctgaaagatgaaattaaatgaatgcttttacataagtgaatgggacttaatttttaaagttctatagtagttacttaatgatagaatattattaagaatagaatataatagtgaatattgtaccatccaaagaagttatcttctagggccagttttcagactatttttttttttaaataaaagctatggattttgtttctgaacaccttggcaattattttgaagtcttctatcttttgagatttgtgatttaatttaaaaatagcattgctgataagattaaggaagaacactaccaaattctagcaaaataatattcacttctttataaattgccagtctcttaacagtttgaaaaaacataaagcgtgtttcactttcaccctctgaagcttttgggtgtacaggaacatgatttctggcctaaagtaggctgacatcttaattatttttttaaacaatatttaatcactttgtaattatataaagaatacagaattcaattctctttgaaaaagtgttaaagattaaagttctttttgacctccatatcctaatcctgatcccctttttgcctacctagattaaggctttttaaccttggctaaatatattttaagaaagcaaatattggccaggcatggtggctcatgcctataaccccagcattttgggaggccgaggcaggcggatcacaaggtcaagagatcgagaccatcttggtcaacatggtgaaaccccatctctactaaaaatacaaaaattagcggggcatggtggtgtgtgcctgtagtcccagctactcgggaggctgaggcaggagaatcgcttgaacctgggaggcagaggttgcagtgagccaagattgtgccactgcactccagctggcaacagagcaggactctgtcttaaaaaaaaaaaaaagcaaatattactaacacctttagctatcttattgtagaatctttatattccctttttttttttttttttttttgaaacagtcttactccatcacccaggctggagtgcagcagtggcatgatctcagctcactgcaacttcagacttctgggttcaagcgattctcatgcctcagcctctttcatagctgggattacaggcgtgtgtcaacacacctggctaattttcatgtttttagtatagacaggattttgccatgttggccaggctgggcaaatttttaaaaaagagttaacagggctgggggcagtggctcatgcctataaccccagcactttgggaggctgaggtgggtggatcacgaggtcaggagttcaaggctagcctggccaacatggtgaaaccccatctctactaaaaatataaaaattagccaggcgtggtggcaggcacctgtaatcccagctactcgggagactgaggcaggaaaatcgcttgaacccgggtggcagaggttgcagtgagccgagatcgcgccattgcactccagcctaggtgacagagtgagactcttgtcaaaaaaaaaaaaaaaaaggagttaacagaagtgttatctgtgaaatataagcataaaaccatgagttgttgttactgagttatcattatgtcttgttctgtttgggaaaaataagttttttgtaacccagaaactgtcaacatcagtttttttatgtgttgacagtctgcagttttaaaaataagagattgaaaacagtcaaaaattttgaactttgttcaaccattcattaattaccaaatgtgtagaagaaaaagccacaataaatgcatttactttctttatttctttctcgataagaattttgatagagcgttgtgtaaatatgtgactctgtctaaaaaagacttttttccatgttttgctcatgattaacataagaattaactatctcaatgattgttttcaaggctatgaaaatgagccggagatcagctgatgccagtcagagaagtttggcatataatcgaatagttgatgccctaaatgaattcaggtacatattgcccagctttccataatgcagtaattcatagtgtacacaggaagattcattttttctttaacttgttctaataaaatttgatttctttgtcctatagtcatatgatggtgtaattcagtagaccattggctcctatgttattacatctcaaatgtgcttgagaatcaagcacattgagagccatcagtggtatgtttttcagtattgggccatttgacaagcaaatatgaccaggaaagacccttgttctagcaaaagtatgctttgttctctcttgggatcctagatgtagggactgttaagtgttatttaaccagtggtagtaatcagatattcttgaatacatgagatacaaggatatatggatataaggaacatgcacttgatattctaaatggctttgttgcttgatccttcctctagatatggcacagtgaatagtccttccgctagggttttctggctcaacaaagcttgtacctgaagccccaacaactgctgtagctgtcttctaactatgtgacatacatactacaaatgatgttatgttgggaattagtatactaagtgactgatatgtctccctcgacaagaggttcggtttaggtctacttcattttctcaatctttcctcctttagactagagagatagaatagcatagggagtgaaaactaagactctagaatctgtcagacagacgtggattttaaccctggctctgtcatttactacctctggtgatcttgggcaagtgcattagcgtttttgacccctagttttctagtataaaataggtaaattcaatttagtaataatctaatagattgttataaggatcaaatgaaattgtgtgtgtaaggtacttagcagaatgcctgacattagtggcaccattcttttcttttctttttctttctttttttttttttttttttttgaggtggagtcttgctctgtcacccaggctggagtgcagtggcgtgatcttgcctcactgcaacctctgcctcctgggttcaagcaattctcctgcctcagcctcctcagtagctgggattacagacgcgtgccaccatgcttggctaattttttttttatttttagtagagacggggtttcaccatgttggccaggctgttctcaaactcctgacctcaaatgatccgcccaccttggcctcccaaagtgctgggattacaggcatgagccactgagcctggcctatggtaaacataacctacagcagtgcttccccaacttaagtcacttacatcatatcttaacaattttgccaaatttatatatcatgtatactttttaaatttagtgtttctctttaaatttgaccatcttttatacctaaataaatctatttcaacatgaaacttcattaccctagatagggaaacaatatgctttaccataataaaactagctataaaaataaatttatagtaactaaaattaaaaatatgtatctgggccaggcgtgttggcatgtgcctgtaatcccagtactttgggaggccaaggtggttagattgcttgagctcaggagttcgagactagcctgggcaacatagtgagaccccgtcacaaaaataataataaatgtgtatttgtataccacattgtgtacactacgtaccactgtgtaaattttattattaccagtagtctatgtaccttacttttagaaaaactacattttttttattgacaactgtgtggtctcttactggggcagggatcttctagattgttgtttgtttaaatgggccatcacatcttggagtgaaaggctgttttagtttgtgtaactgcaggattgctatgatgaaattgtaggcatgccatacatatatataaaattttaaaacttttaaaatatataaaacatttttaaaactgagctaaagagtggtagatttaaattgaagaagtttatgactattgtataataatcatttacttgactcaattattgagaaagagaataatgtctactcattcatttggtttatgcatcataatgtttaggataaaagatatgaaaagctagttaaatatatcttactgttctgtacagtacactcagtggttaggggaaatgtagagaaaaacagagagaatttaatttcaccttatattattttttggtattagaaataatttgtacaggcaaaaactgtatttgagatgatatttctgccatatattaattttattttaacattaattttaggcatttattatatggagcatgctaacaaataattttaatttaatatttttattgtaaaaatatctataacgttagatttagctttataaatcattttttaggtgtacagttcagtagtgttaagcatatttacattgttttgaaatcaatctctaaagctttttcattttgggacactgaaactctagtgatacggtaatcagtgtgggttttttttagtttactggcatcttcactctttatatctgaattatatgcaaagttattcataatttcatttcttcatacttaaaccataaaggttgagattatcacattttgggtgccattcatgattaaataaaagcattatatgcatgttttttatagatgaagtgtaggagaaatcaaatacatttgcagagggaatttagagcaacttttatgagcttcctgatgtacagtctactttggcttcataacttctcaatttatatagccctgtttgtatgtttctagaagttctgtgaaaacacaaaatttgatgattttatgaatgtaagatggaaataattttaacatcaggattatttgcttgagatgacaatttctttgagttgtattgttttaatataaatgtttaggtatcttctttatgatttaggaggtaaattatacaaagttgcttaaaccaagtgttaatggtttaggcctgcctaggatacatatcctaaccattgatttgatatttcagtaagtgttctacagttaaggaaaaagaagcccatattaagctcaagataagtggttttctgttttctcaatgttgaacacagtttttgaaagcaggtaaattgtaggtgatggaattccagccagccagcagacattttatgtgactactgtgtttttttaataaacatttgaacctttaggcctgtaggccaggcaagctttctttagtttggcataggctgtatctctctcagtcagttgtattaacccatatattgtataattttattcctgccaggcctcggaagattattagtttatacttcggttttaggagttggtgatttatagccattaatctagaccttattcttttttaatttgtagtgcagtctgattttcgtgcatcttctgatactatccatgtttgtgtctgaagagctagacctgcacaggctgaataatgactatcccttctttcttttcttctggaatattgagagtgggagtgggggacagcaaaacgaaacaataactaaatggtaaattctaagacatgcctatctcttatattgtctatttcttggccactctgtattatcagttaagagtataaatagctgtatatagctttatttttccagtttgatgcatgagtttatgcacgcacgtgcccacacacacaatgaagagacttaatttgaacagtttcagatttacagaaaaattgagcaaatagcagttttttcatatagccctcttccccaacctacagttttcccagttaatgctttatttatttatttatttatttatttatttatttatttatttatttatttgagacagtgtctcactctgtggcccaggctggagtgcagtagcacgatctcaactcactgcagcctctgcctcccagggttcaagtgattatgtgcctcagcctcctgaatagctgggtttacaggcgtgcactactacacccagccaatttttatattttaaatagagatgaggtttcactatgttggccagactggtgtcaaactcctggtctcaagtgatctgtgtgccttggcctcccaaagtgctgggattacaggtgtgagccaccacacctggcgtcagttattaatgtattgcattagtatgatatatttgttaaaactaatgaactaatgttaatacattattactaaccaaagaccaaaatttacattaaagttcactctgttgtatagttatatggtttttattaaatgtatgatgtcatatacacaccattatagtatcatatagaataatttcaccgccctaaaaatcccctgtgctttacctgtttatccctacccactaactgctggcaaccactgatctctttacctctttactttctctatatttttatcaattccagaatgttgtatgcttgaaatcatatgctatgtggacttttcagactggcttctttcacttagccagtctttcgtaagattcttccttggtggtggtggtggtgttgctgttgtttttacctaatagctcatttcttttcatcatcgagtaatattccattatatagatgtaacacagtttgtttattcattttcattcacctatcgaaagatatcttgcttgtagtttttggtgattataaataatactgccataaatattcatgtttggggttttatgtggacatgttttcaactcagttggaaaaatacataggagcatgattgctggatattatggaaaaactatgtttagctttgtaagaaatgatcaaactgtcatccaaaatgactgtaccattttgcattcccaccagcaattagtgagagttcctattgctctacatccttgtcagcatttgatatggtcagtttgtcaattttagccattctaagaggcaggtagtgatgtatcattattgttttaatttgaagttccccaatgacatatgttgagcattttttcaaatgcttatttgccatctgtgtatctttttcggtgaagtgtctgtttgggttttttgtcctttttaagttggcttttttttcttattgttgagttttgacggtttttgttgttgttgttttgttttgttttggataccagttctttgtcagatttaaaaaaaatacttcttacagtttgtggcttcttcttataatagtgtctttcacagagcagagtttttaattttaatgcagtccaacttaacaatttttctttcctgtatagtatttggtgctgtatctaaaaactcatcacctaaccaaaggtcatttagattatctccagtgtaattttctgtctgctttatagttttgcattttatgcttatgactatgatccattatgaattaattttatgaaaactgtaaggtctttgtctagattcatgcttttacatgtggatgtccagtcgttgcagcaccatttgctgaaaatactttcttttctcaattgaattacctttgctccgttgtcaaagatcagtttatactctagttgtgtgaatctgtttgggggctccctgttctgttctattctgttctgttctgttgatctctgtaactatatatatatatatatatatatatatatgtatatatatatatgtgtatatatatatatatatatgtatatatttagctattaccatgctttttttttttttagttgacaggtaaaaattgtgtatctttatagtgtataaaatgatgttttgatatgtgtacacatgtggaatggctaaatcaagctatttaacatatctattacctcacgtaattatcattttttgtcattaaaagacttaaaatctactcttagcaatattccagtatataatattattattaactgtagttgccatgatgtgtaatagctctctggagccctgaaatttttttttttaaatttattttttttttagacagtctcactctgtcctccaggctggagtgcagtggtgcgattttggttcactacaacttccacctcctgggttcaagtgattctcatgccccatcttcccaagttgctgggactacaggtgtgtgcctccacacttggctaatttttgtatttttagtagaggcagggttttgtcatgttggccaggctggtctcaaactcctggcctcaagcgatctgcccaccttggcctcccagagtactgggattacatgcatgagccctcatgccaaattttgtgtcctttgaccaacatctcccttatctcccaatccccatgctatcttaattactatatctttatagtaaatcttgaagttcagtagtatcagtcctccaactttgtttttattcttaagtattgtgttgattattctgggtcttttttgtttctatataaactttaacatcagtttgtagatgtccacaaaataacttgctgagattctcattgggattgtgttgaatctatggatcaacttgggaagaattgacgttttaacaatagagtcttcctattcattaccatggaaactattcccatttatttagatcatctttgattcctttcaacagaattttatacttttcctcatatagaccctgtgtatattttctcagatttatacatgttttttgggggggtcagggggagggaacctaatgtaaatggtattgtttttaattttacatttcagttgttcattgctggtctgtaggaaagcagttgacttttgtatatttacattgtattctgcaacctcattataatcatttattagttccaacagttgtttttttctttcgattgattctttgaaactttttatatagaaaatcgtcttccacaaataaagactgttttatttcctttccacatgtatactttttctgtcttccttctttccttccttccctcttttttgtatctttgtgtctttcttacagccctagctataacttccagtatgatattgaatgagagttgtgagaggacacatcttgaccttgctcccagtcataggaaaaaaaacatccagtctctcaccataagtatgatgttagctgtaggtttcttgtagatattctttcaagttgaggtagttcccctttattctttgtttgccaggagtagataattattgattcaattttttaagtagacataggctattcaagttaatctatttctccttatgtgagttttggcagtgtgtgtttttcaaaaaattgatgcatttcatctaaatttgtgggcatagacttgttcatataattccttaattatccttttaacgttcatagtatctatagtgatacccctcttttgtttctgttatttataatttgtgtctttttgtgtttttcttggtttcctgataaaggcttaacaattttactgatcttttcagagaaccagcgtttggttttgttgatattctctattttctgttcaattacaataatttctgctctagattttactattccttatctcttgaatgctttagttttatgttgctgtttgtctagtttcctaagattaaagcttagatcgttgattttagatcttcttttctaatatatgtattcaatactattaatttccctttaagcactccttttgctgcattcacaagtattgataagttgaattcacatttagttcaaaatattttaaaatttctttcaagatgtcttctttgacctatgtgttatttagatgcatgttttcaatctccaagtatttggggattttccagttatctttttcttactgatttctagtttgtgatttgagaacatacattgtatgatttgtattattttaaatttgctaaggtgtgtcttatggcctagaatgtggtccattttggcaaatgttccctgtcagcatgggaagattgtgtattctcctgtttttggatgaggtattgtataaatgttaattagattcagttgactgatggtactgttcagctctattatatccttactaattttccgcctgatggatacgtcatttactgatagaggagtgttgaagtttctaaggaaaatagtggatttatttcttcttgcagctctgtttttgcctcacatactttgatgcttttttgttaactgcaaattcattaaggataattatgtcttcttggaaaattagctccttatcattatgaagtgcccctctttatctctgataattttcactgttctgacctctgctttgtctgaagttaacacggctattagtccattttcgtactgctataaagaactgcccaagactgggtaatttataatgggaagaggtttaattgattcacagttcagcatggctgtggaggcctcaggaaactcgtaattatggcggagtgtgaagaggaagcaaggcaccttcttcacaaggcagcaggaaggaaaagtgccgagcgaaggggaaagaagagctccttataaaaccatcagatctgatgagaactcagtcactatcacaagaacagcatgggggaaaccgcctccgtgattcaaatacctccacatggtcttgatcccttgacatgtggggattatggggattatgggcttacaattcaagatgagatttgggtagggacacaaagcctaaccttatcggttattccagctttcttttggttagtgttaatgtagtatatctttttctataccttaacttttattttattttatcttattttattttattttatttttgagatggagtattgctctgtcacccaggctggagtgcagtggcgtgatcttggctcactgcaagctccgcctcccgggttcacaccattctcctgcctcagcctcctgagtagctgggactccaggcacccgccaccatgcccggctaatttttttttgtatttttagtagagatggggtttcaccgtgttagccaggatggcctcgatctcctgacctcgcgatccaccctcctcggcctcccaaagtgctaggattacaggcgtgagccactgcacccggcttctataccttaacttttaatctatctctgactttatatttaaaatgggtttcttgtagacaacataaagttggttctctgccttttaactggtgtattaagaccactcacatttgaagtgataattgatatagttggattaatatctatcatatttgtaatagttttctatttatttcactttatgtttttatcctcctctttttatgtcttctctggttttaagcagttaaacgcttccatttttctctcctcttttagcatgtcatttatatttcttaaaaacttcactttttagtgtttgtcctatagttggcaatacacatttacaactttcaaataaccatgtactgcttcacagggagtgcacatacttcataacaaaatattccaatttctccctcacatcacatcccttataacattgctgtcattcaatttaattttccattagctatgatcattcaatatattgtcatttttattaccctaaacaattatttttctattaggtcaatttagaataaggaaaatgaaagactttattttacatttattactttttggatactctttttatgtagatttgcatttctaacctgttttctctgaaaaatatctttcaacatatattaaatgtcatttttttctgccatcaaatctgtcagttttggtctgaggaagtctttctcttttccttttgaattattttgctggatacagaattctaggttattgtttttctttcaatgttttaaccatttttctccagtctctttttttttttgcatagtttctaacaagaactctaatgcagttcttactcttctataggtaaggttgtttttgtccttcttacttccattaagattttgtctttggttttctgcagtttcagtatgatatatataggagtagatttgttggtatttatcctgcttggtgttctgtgagcctcctgcgtctatggtttgttgtctgttactaatttttttttaattcgaagctattattcatatattttacttctccattttgtatttattacatgtatacttttgtaattgtaccacagctcctggatattattttttatcctttattctcttggcttttcagtttcggaatttttattgacataccttcaagttcattgattctttccttggtcatgtccagtctgctgatgtgcccatcaaaagcattcttcattcctgctccttttttttttttttttaattgctagcatttccttttgattttttaaatgactttccatctcgctgttgcattatttggtcttgcatgttgtctattttaaacatcagagcaacaataatcatatatattatataaaataaacatatttatcataattttcaattcccattctgataattctaaaatctttgccaaatttgagtttgattctgatgctttctttgttcagactagtttttgttgctttctaatttttcattgatagctatatatgatgtattaggatataggaactgagtttaataagattttagtatgaagttttatattaacctagctaggagccttagatgtgtttaatgtttgctgtaatgttagttgtaggtgccagaagcctcactttcccatagtttccttttttttttttttattttaaactcctctttctttggttttccccaagaactacttctttgaatagattctgtgtcctgcagctcttttagttgtaatctgcatttgttacactggagctatgttgatatggaagtaaggtgttggagagaggaaggggaaatgttctgtaatcttaaaattaaatctgattttttttttttagtctgaatttctgggatgtgacctttggaagtatttcttagccatcccctctccctgccacctatttttctttccagaggccagcgaggaaggctgcttctctctcaagtcagataaggctctggtaaaatagttttatttggagggcagacctttgttttggagaatgttctaggaatatttcaaaactgttactttgtcactacctctgtccgaaccatagccagatgtttctctgattttcaccatgaaaatatggtagtatcccatgaaagtggggaggtctccctaagactaggtccctaggagtttttgtcactgagaggaattcacactcattcttcagcagttagtcaattactatttaagtgttcctgctggttattggctccaaaggcttctgcttcaggtaacttgatctcagttgtcattctctgtatttacccattttttcagttttcagagtgatggttttccctctgtccgcagtttggtgatgtaactaagaaaagtcattgatttttcagttccttcagtttttcccttgttctgagaacaagaataatgacttccaagctctttgcaggtcaaagctgaaattggaagttcacatatttttaaatcaatattttaatgtaagaatacattgaactgaagtaagatttaaaactttgttgagttaaaaactgaaattgggccaggtatagtagctcatgcctgtaatcccagcactttgtgaggccaaggtaggtggatcatttgagtccaggagttcaagaccagcctgggcaacatggtgaaactctgtctctacaaacaatacaaaaattagccaggattggtggtgcatgcctgtaatcctagctactggggaggctgaggcaggaggatcagttgaacctgggattcagaggttacagtgagccgagattgtgccattgcactctagcttgcatgacagagcaagaccctgtctcaaaggaaaaaaaaaaaaaagccaaacaaaccacaacctaaattgatctagacttttctttggaatttaaattacatcataaacctatgctttttttttttttttgagaaaggaaaaaaaaaccattcagatactgctgtcactagagaagtataatgaaaactgtttcccaaactcttagagtttgtttagtaggtatggggctagcatctacatttcacaaactcttttggtaataactagcttaaactttattcaggggccaagcttggtggcgcatgcctgtaatcgcagcactttgggaggccacggtgagaggattgcttagagttttgagaccagcctgggcaaaaaaagcaagaccctgtgtctgttgatagcacaacagggtgactatagtcaataataatttagttgtacattttaaagtaactgaaagagtatgattggattgttggtaacaaaggatatattcttaagatggtggataccccatttatcctgatatgattattacacattgtaccccataatttatattacacttacagtgtacccacaaaatttaaaatcaataaaagacctcatctctaaagtaaaaattttcgaagtagccaggctcaagtggcgtgcacctgtagtcccagctacttaggaggctgaagcttggcaggattggttgagcctaggtagtcaaggttgcagtgagttatgattgtgccactgcacttcagcctgggtgacaaagtgagaccacatctctttaaaaaaaggacaaaactcttttcaaggagaaaaattaccaaattgtgtctttcttctgcactactataatggaactataagccttgtcttacacaattactgttcaactcttagcagggatgtcagagtcagcatttgagagcagttttgtattgaaataaagagcaatttctgattcttcagagtgattatatatgcaaacgaaggtgtctgtgtgttttattgaaatcaggacattttgaacctaatatcctgataagctaaaatactatcaattgggtaaaattggttatttattatccctaatggtttatgacagctttactctgtatacattcccttgtagcccagtgcatgtgccaccagtgcctgtgctctttacatagctgaaagattgaacttaaccacaattcaaacacacacatacacacaactagagtggtttctctacctataaaataggcctcttatgaatataagtagtatttgagaactatgaaaagttatagccttgtatttgtctaaatttaatctacagttggaattttttttttttaactggagtgaggcaggattgcttgaaagcttactcaaagattcttaaggagcgaggtgcagtggctcacgcctgtaatcccagcactttgataggctgaggagggtggaacatctgaggtcaggagtttgagatcatcttggccagcatggtgaaacccgtctctactaaaaatacaaaaattagctggatagtggcggctgcctgtagccccagctactgaggagcctgaggcaggagaattgcttgaaccagggagcctcggaggcggaggttgcagtgagctgagattgtgccactacactccagcctgggcaacagagcaagactccatctcaaaaaaaaaaaaaaaaaagattcttaagggttttgcttcccctgaagtagatattatgccagtaatataaaagaaatgtgcaatgaataatcagatgtttcatttgtaattttttattttttgtggtttaaattgtttttgtttttgagagagggtttcaaaacactcctaggcaggagtgcagtggcagaggatagctcactggaaccttgatatttttaaatattttttaaatatgttgtataatggggttactatgttgtccaggctaatcttgaactcttgtcctcaagggatcctcttgcctcaaccacccacagtactgggattacaggcatgagccaccgtgccttgtctggtttaagttgttttagtttactttgtttacaccagaattattattaatacgttttatcgaaatccagacattttattttatttattgaaatcaagacatttaaaattttgtgggtacattatatgttttcaatagttctttttgcttatttgcttgaaagaatccttcaggattctttctgagtatcacatattgcattagtataaggcagtgaatctttgcccttgaacttgcagttaattatactattggattgacaaattcttttctgcagtcacaagctttgtggcaaaggccaaaagtttctgcttgggctctgaggaaacactgtcattatagatccagctgaagtcaccagaacagtaaatattgtcataagactccctccaaacaggatactgatcttgcttttagattttaaaagacttttttatttttcaaaattttaattaaatacttgtgagtcaattgctgtggtattatatagtacaaatggcctagacttagaatttcaagattgcctggaatttacagcatgcgagttataaaatctgtaaaagtatatgtcactattatgtgcctttccatttgtattgtttgattattttgcttcagttgctgtgcaaatatgaaagggatattaaatattcttataatattttataattttcaataggaggtctacctatataagtactttcacatatacaattgatattcaccatttgtggattttgtattttagaattcacccacttgctaacatttatttgtaaccccaaaatataattgcagtgcttttgcagtaatttgtttacatgtgcaaagcaatgaaaaatgtgagttgcctgacgcatatgttcctagtttagatcaagcaaggtctaatgctttgccttcttgttttaattctcatactgttaacaaatatacttttttgacatttatttagtgccaatttttttgcatttttctgctttttgttagtgactttgctgttaaaaatggcttccaaatgtagtgctgaaatgctgtctaatattcagtgtaagaagattgtgatgtaccttacagaaaaaatacatgtgttagataagcttccttcagacattatttatggtgctgtcagccatgagtttaatattaatgaatcaacagcatcaaataagatatccttaaacagagaggcacatcaaggttatgtattgagggtttgatgaaaatgtgaccagaggctcataggaacctgtttattttccttaggggcagtggttcagtgttgctaattcagtgcttgagtgggctttatagaaaataactacctcaaataatgagaatagactctgcagtcagacctttatatctgtgggttccacatctgcaaatcagccaacctcggatcaaaatatttgaaaaagaaaaaccaataaaaattaactgcaattaaaaaaatacacattaaaaaaccaatgcggtataacaattattaacatagtatttacactgcatttggtattataagtactctagagatggttttttttttttttttttttgagacggagtcttgctctgtcacccaggctggagtgcagtggcgcagtttcggctcactgcaagctctgcctcccgggttcacaccattctcctgcctcagccttccgagtagctgggactacaggtgcccaccaccacgcctggctaatttttttttttgtatttttagtagcgacagggtttctccgtgttagccaggatggtctcaatctcctgacctcgtgatctgcctgcctcggcctcccaaagtgaggtggttttaagtatacaggaggatgtgcatgggttacatgcaaatagtatgccatttcataagggatttgagcatccacagattttggtaaccatgggaattctggaaccaatcccctgaagacaccaagagataaatgtacttcttaaattaagggattatttaaaattaacaatgacataatctttaaatgattatttgagatcaagtgattagtaaattttgggcagttgagaagaggaaggaaattatttacatgtgtacagaaaccatgaaagctagagaagcaggaagcatgtttagttaacattgctgcctaacaaagacgaagtctttagatttttatatagaccctaggcatatcaaagaaaactaaatcatgcctacagtttcctcccaaccaaaagagtctttcattgtccgggcactgggaaaaataaggggacagactgggaaaaataaggggacagattactgaaagtatttgcttttcttaccattgaatgatagggcacaattattagtggagaagaaagaaatgatttctagaataaaccattacttctagatttttttttttttgagacggagtcttgctctaccgcccaggctgaaatgaagtggtgcaatctcagctcactgtgacctctgcctcccaggttcaagtgattcttgtgcctcagcctcccaagtagctggaattacaggcactcaccaccacacccagctaatttttgtatttttagtagacgggattttgccatgttggccaggctggtcttgaactctcaacctcaggtgatccgcccacctagacctcccaaagtgctgggattatagatgtgagccaccgcacctggccattacttctagattgttaatgacaacaacatagagttgtatatagtgagaagcactgttgcgtaattaatttctttgccttctttatacttgataacactctgaggccatagcatatataatacttttaaacaaatataatactaaaatactaaagcaaaggctctcattggaccactaataccagtgtttgtgatctggctctgtgcaatgacacatggacttatagtagacggtaatatgctgaagaaactcatgaaaaagtcttaaatgatcagcatatttatttatttatttatacattgtttcttttaatcaaaaagtatatgcacatgattaagaaacaaaaatttctgaaaggtccaataattaaaaataaatgaatcctatcctactcaccccattcttcccagacacattctctttttaactattatttcttgttatttacttccatattattaaaaagtatacgaaatgttgctatttcctcatttatcagttttagatcatatttattttctgccatgatatatgggtttatacctgtttcttggtcctttatggtctcagtattgttatagcaccatcatgttcttcggctctggtaatttttctgctttcttttacaatttattctgttttctctctggaatccgttttttttttttttttagaaattggcactcctggattgttctgtgttccttttttttcatattttccttctctttttgtgaatgttttgtttttctatcccttctatgcttttttcatttcagcaaatctttgatgctttcttatttttggataatccttttctttgaaaattagattctctaccatactctttaattttaatgtacattagagttttgtttaaaagttttcttccattgtttgcattatttctgttttcctctggagtcattttatatgggtgagtatgtgtgtgtttctgttcttgtctttttctctgcttggaggctttctctaaatatcagtgtttttggttgcgctctgtagttgagaatgaggtaacaaactgtaggttaggaattctgtgcataatcaggcttttgactggagaccttcacttcagggcagtgtttttcaacctttttttattatcattacctgaagaagcatatttagatatttttcccctaatctctgctccttcaataccaccgccccccacaatcccatgaagatttaacactacaagatatactctatatctgattatatactctgaaagatacaaatgccaggaagagtttggaaaaggtcattcctcggggccattcaactgctatatctgctctctcctatctgtagtcattttctggggaagtggagaggaggtagggagctgccaaccatttatggactttgaattagtctcccaattttcagtactgtatcgtaactcctgtcatgactttcccaaaaatttgtgagtcttgagcctcatcttgctttagtggggcaaattagctctcctttgtccatgtctccctctgtgatactatgaccttataactttctctactctgctacttcaatcacaattccaccatatgtttgtattccagaatttcatgaaatctctaattttaattttcagtaatagttccttggcaatttttttaaaattaagtaatttattttttaaataatagagacagggtctcactgtgttccccaggctggttttgaactctgggcttaagcagtcctcctgccccagtctcccaaagagctgggattacaggtgtgagccaccacacccagctggttcttctctaattctatttgttgcactagtttatctgttttcaaatctttaggtggtgttcatttggggcctcagaaactgaagagaggataaacatttgtcttcaattttccatcgtatctggacacctgtaataagctttaaaaacaaacattttcatatatgcctagtttgtattctagtcatatttgctctataaaataactttttgtttattttaaaattcttagcaatgattatatgttctacagagagctcattaaagtgacctgttcttattgtttctatccattgtaatacatcatgtttatattgtttcaaattcaacaaaatttgtagaggcaagataattcttctcttttttggctcctaggtgttaccagacagtgatactgaggttggtattagaatttatggaaatctcagagaactttctagagcagtattgcacaataaaatctcagccgtcagccacatgtggctatttaacttaattaagataaattcccttccttagtcatactggtcacatgtcatgtgttcagtaaccacatacagctagtggctaccatttcagacagtgcaggtttccatcattgccaggttctactagacagcattgttttaaaaagtagaaagtaggacaccattctgtagttctccaggattgactagtttcttaagcctcaggcttttgcaggagttgcttagtctagtaaatgtatagggctttgttaaatagataatgatgtaaaaagaaaataattaacatcttgaaagtatgctttgaagccttcaggagaaagtacaagtcacaggactagctattgtctaaattagtccaagagacagctaagaaagcactgtgctaattgtgtgataatctttttttgtgttgattcaaggaaacactgtagaaggttgagagagtcataaaatgtagcatgtatgtatactgttctcgctgtccttaagaatgttactagagtcttagcataggcaacaaaatgatgcagataaactgttgttttgagtgggtagatggataagctgttacctcatttagaatattttctttttgtacatgtagttgattatttgcggtatatttaagtacagcataccccgtagaaatgtggagctggaatgggctttagaaattatcatcgtatcctttcattttacaggtatgggaaacaaatgcttaaagtagggaaataatttactctagggcacacagtcactggtggggagagccaacaccagaaccaacatattttgagaacatttcccatggtactgtgttgttgacaaggaaagaaggacttggtccattgtctttcctcaaaagctttaataatctagatgtaaggaccaagctggcaatataaacttaaaattattttaagagtatgtaactcttggaactatacatttcataatgtgtcttcctctttttagaacaacaatttgtaatctttacacgatgccacgaattggagaacctgtctggcttacaatgatgtcggggactccagaaaagaaccacctttgctatcgtttcatgaaggagttcacctttctaatggaaaatgcttccaaaaatcagtatgaatttatttattataactagatatctagattgtaatcaaactcaattacagatgtggaagaatcatccattatctttggaattattttatattattaatcaaaattaataatcagaattctaaaaaataattaaatgatagggtatggaagagtattacagaaccttatgaatgaaaagcagtgaaaatgtctgtaattatgtaattaaaattcctgacatattgtagaattatctgaggctgcccatttttttgtgagttgtatccatttatagttttatttcatagaaaagaggtagaaaacatttaaggatggccaggcgtgatggctcatacctgtaaccccagcactttgggaggctgaggtgggtggatcacgaggtcaggagatcgagacatcctggctaacacggtgaaaccctgtctctactaaaaatacaaaaacaaaattagccgggcatggtggcgggtgcctgtagtcccagctacttgggaggctgagacgggagaatggcgtgaatccaggaggcacagcttgcagtaagtggagattgcgccactgcactgtagcctgggtgacaaagcaagactccgtctcaaacaaacaaacaaaaaaaacatataaggaaatggtaggattctaatgatgcattttcaatgtgatgttttatcgtattgtattattttaactattcaagtctttggaatccagatgaataattcagttgtttttattctctttgatgatagacagagtttgcttaatactttgcctcgttttcccattcagtaatttggaaatgtaaggacctgctggttgattcagtaattaattgtgtgattaaacactgaaaataatccataatttttgaagtaaaatggcatttctgttttgtacttacgatctgcaatagctcttatgaatgtgttatctttatttcaagtagtttttaactcctcctcaaccagaaactattaactttcattttaatcttggtgttatatactcatcctttcctctctcttctcctttttttggtgccatttggccacatgaacatatatactccccttgcttactttttcactacattttacctaaggtttcatgaagactgattggaatctgatcagatgtattttgttttcagattcttgccagctctcattactgcagttctgaccaatcatcttgcctgggttccaacagtcatgccaaatggacaaccacctataaaaatatttttagaaaagcattcctctcagagtgtggacatgttggcaaagactcatccatataacccactttgggcacaactgggtatgtaatctgacaactgttacactatgtattagacttttttgtagctatctgtaattattttatagcaaaaccaaaaataaataaaatgcttttacctcctgcattctaaagcatctctgctttgcttgtcctttcatgtctgccaatttgtcttatcctcgtcttagacctgaaatcattccttatagatgaagaactgcaggtagagcaagaggagcaggctgatagctcgtttactagtaacttcagatcttcaggatgttttatgattttgtactttgtgttaggtactttgcaagaaagaataaatcaacagtcaccggtgatacctaaaatcaatctggttaggagtgaagcaattcactgaggtttctgttgatccacttttgttcacttgctgagtcattttggaaaatgtttccctcagtgttaagcaccactaaacaagtcggggaacagaggggagagtagatggttgataagttcatagacaatagggagggattgtaccagggtgctaaagacacaggctgtggagtcaggcacaccacatttgaatcacagtttccttattcataaagtaggaataatagtagatgatacatactttaaaagttgtaaaaattaaaagagataatacatgtaaaatggttgagactgtgtctcgtaaacgtagctgctaattacctctgctcctactctgttgcttttagatgatgggggaagagtaagatgagaacattttggtgactgggtagtaactttccttaggttgctctgtgattgagcttgccaggtggattgtcatatggcaatatgtcatatgacatatatcaattcatataaccaacctccatccctactggctttctcccttgttccctcccccattcccttccattttattgagttataattgacatacagtaaatgcatttttttaatgaagtctcactcttttgcccaggctgaagtgcagtggcacgatcatggctcactgcagctccaatttccctgggatcaaatgatctccctaccttagtcacccaagtagctgggactacaggcgcgtaacaccacaccaggctagtttttgtatttattgtagagatggggttttgccatgttcccccaggctggtctcaaactcccagactcaagcgatctgctcatcttggcctcccaaggtgctgggattacaagcatgagccaccacacctggcccaacacatatttaaagtacacagtttgggctaggtgcagtggctcatgcctgtaatcctggcactttgggaggctgaggtgggtggattacttgaggtcaggagttcgaaaccagcctggccaacatggtgaaaccctgcctctactgaaaatacaaaacaatggctgggtgcagtggctcacgcctgtaatctcagcactttgggaggccgaggcaggcggatcatgagggcaggagatcgagaccatcctggcttaacacggtgaaatcgcatctctactagaagtacaaaaaattagctgggcgtggtggtgggcgccagctactcaagaggctgaggcaggagaatggtgtgaacccaggaggcggagcttgcagtgagccgagatcatgccactgcactccatcctgggcaacagtgcaagactctgtctcaaaaaaaaaaaaaattagctgggcgtggtggcaggcgcctataatcccagccacttaggaggctgaggcaggagaatcccttgaacctggaggcagaggttgcaatgagccgagatcatgccactgcaccgtagcctgggtgacagagcgagaatctgtctcaaaaaaataaagcaatttgataagtttcgcatatatgcctctgaaaccatcaccacaatcaaaatggtaatcatattgcatcacttacaaaagtttccttatgcctttttgtaatctcttcctcctcctcctcctccccatctccttctccccaacttctctgttcctcttccaccatccctaggcagccactggcctactttctgtcatggtagattacttgcattttctagagttttatatgaatggaatcatgcagtatatactttctttgatctcattcattcaatataattcagattcacctattttgtatgtattaatggttcattcctttttaatgctgagtagtattccattgcatggacctttttaaaatcaaattattagtagtattttttaaattgggacatttaaatccttttttaattctacaatcatttgttgactgtctaggctctgtttaaaaagcacagaggctgtaaagatgaatgatttggaaattgccctcaagaagtcgacagtctaagactgtaggtaatatatatgcagacaacaatgataattcaaggaggaactataagagaaatgaaaagtttagtgagagttcaacaggggagcctacttttgtccaagtgaggatgcttaggtgggaagctatggactggcagagatattgaggaaagggacaggacatcacatgagtaaagagtctaggtgttaaaagtgcagagcatattcagtggtccagtttaactggggctttgtgcgaataaggatgatttcttcttctgactgccaagaaggaggataagtataagaaaataaagctggaaaagtaaagtgggaatcatgaaagactcacttgccatgccaaagcaatttcaacttacttggtaatttgtgggaattatgggagtagtttagaacagtggcatggtgatatttgagccagtgtgttagccagaagagaaaatttatcataatagtatctatagcttatatttatttgagacctatttatatttgttcctttaaaaagtgtgagggctttgtaaagtaaaaatagaggattttaaatgtgtatactgacaacttcaaaaattgaattaagttgaaattaatggctttgtattctcctttttttttctttctttcttgagacagggtctcacgctattgcacaggctggagtgtggtggtgcgatcacagctcactgcagcctcaacttcctgggctcaggtgattcttccgcctcagcctctcaggtagctgggattacaggtgcgcgccaccatgcccagctaattttctgtatttttttgtagagacaagggtttcgccatgttgcccaggctggtcttgaactcctgggctcaagtgatcagcctgcttccacctccccaaatgctgggattacatgtgtaagccaccatgcccagccctattctccatagttttggcactgaaattactggtttaatttgaagtatagcataaatatagaaatgctaatttctagtcctgcccccctcacctcccctgcttttaacataatggctagtcatgtttagaatggattcaaaagtgaaaatgaactgcatggctgaacttgttgccctttcttttccttttagtaaggatgagtctctctcttcctgccctttctggcctatcctgagtacccaaccctctagggaatggaaggggaaaataggcttttacaaacatgggagctggtggggtggggtgctggctagaggaacaacagttaaagttcagagatatgacttacttttttattttatttctttttattttttattatttttatttttttgagacggagtcttgctcttgttgcccaggctggagtgcagtggtgtcatctcggctcagtgcaccctctgcctcctgggttcaagtaattctccagcctcagcctcccaagtagctgggactacaggtgcccacgacaccacctggctagtttttgtatttttagtaggtacagggttttaccatcttggccaggctggtcttgaactcctggtctcaagtgatccacccatctcggcctctcagagtgctggaattacaagcgtgagccactgtgcccggccccagagatatgatttaaatcaggaatggttaagtgtgtggtgtgacgactatagctttgctccattttaccactactcctttcctctccttgcaagccagtggatattgtgctttgtcttttcttgattggacacagctacagaatccttgtgtacatagtacttcaggcagtacttctctaacaaggtaaaaatgctctgcatggagcctgggttagagaatattcttgggatatgtgagtttcagaactgactctttgcttgaggtttctgaaccatagcatttgtttaaagaggaaaccagaaaacccttaaattcacctttctctctggttaagattattcatctcatcttcctcccttgaatagtcactcatctgttaaagaactaagagtgaggccaggcatggtggctcacgcctgtaatcccagcactttgggaggccagggccagtggattgcttgagcccaggagctcaagaccaccctaggaaacatggcaaaactctgtctctacaaaaaaaaaaaaatacaaaaaattagccaggcatggtggcacgcgcttatagtcccagctactcaggaggctgaggtagcaggatcacctgagcctaggaggctgaggctgcagtgaaccatgattgtaccactgcactccagccaggattacagtgtgagaccctgtctcaaaaaaaaaaaaaacaaaaaaacgagtaaaacctaaactattactcatacagtaaaagaagtaggtttctgatcattaaaaatagcttacttagctgtgtcagtaaaggacatgtccaataactgattttttccattacaggagacttgtatggcgctattggctctcccgtacggttagcaaggactgtggtagttggcaaacgacaagacatggtccagaggctactttattttcttacttattttataagatgctctgaacttcaagaaacgcatcttttagaaaatggagaagatgaagccatcgttatgccaggcacagtaattactaccactttagagaaaggtgaaatagaagaatcagagtatgtccttgtcacaatgcatagaaacaaaagcagtttgctctttaaagagtcagaagaaattagaactcccaattgtaactgtaaatattgcagtcatccactccttgggcaaaatgtagagaacatttcacaacaagagagagaagatattcaaaacagctctaaggagctgctaggaatttcagatgagtgccagatgatttctccttctgactgccaagaagaaaatgctgttgatgttaaacagtacagagataaattaagaacttgctttgacgccaagttagagacagttgtttgcacaggatctgttccagtagacaaatgtgcattgtcagagtcaggcttagagtcaacagaggaaacatggcagagtgagaagttgctggattcagacagtcacacaggcaaagcaatgagatccacaggaatggttgtggaaaaaaaacctccagataagattgtgcctgcttcattttcttgtgaggctgcccagacaaaggttactttcctgattggggattctatgtcacctgattcagatactgagcttcgaagtcaggcagtggtggatcagattaccagacatcacaccaaaccattgaaggaagaaagaggggctattgatcagcatcaagaaactaaacaaacaaccaaggaccaatctggagagtctgatacacagaacatggtttctgaagagccctgtgaacttccctgttggaatcattcagacccagaaagcatgagcttattcgacgaatattttaatgatgattcaatcgaaaccaggactattgatgatgttccatttaaaacaagtacagatagtaaagaccattgctgtatgttagagttttcaaaaatattgtgtacaaaaaataacaagcagaacaatgaattttgtaaatgtatagaaacagttccccaagattcatgtaaaacctgctttcctcagcaggaccaaagagatacactctccattcttgtcccccatggggataaagagagttcagataaaaaaattgctgtaggaactgaatgggacattccaagaaatgaaagttcagacagtgcccttggggatagtgaaagtgaagatacaggtcatgatatgactagacaagttagcagttattatggaggagagcaagaagattgggcagaagaggatgagataccttttcctgggtaagtaggaagttttcacctataatgggccctatataaatatgtaccattctcttttttagctgttctctgaaggttagtataaaagagatcattgttctggatagctctcttgttttcatattctcttaactcataagaaggagtaaaggctaagctccagaaacaccctggaaaggttttatgaagacctcaaataaaagttaaaggatctggttgataagtataagatttcttactgcttagaaggtttcaagccatttaggagtgacttatgccccccaaaggacatatgctgagcctggcagttagggagcactaatccctgagatgttagaatagctgttagaaatagatttggccaagactaagaggaaaacagagaatgtatactttgggtcaagtatgcaaggagaatattcatgcttgagaaacattacatacctagctttggacttgtgaggcatttaattgttttgttttagatgattgttttcataatctgattgtattaagaatgtgctacaaacacaaggtacaattctcttaaagtctcttaggaaagattgatcctcacttcattactcagttgctcatcagaccttcttctctgaataagaaggagtattttattttctgatagagcacttgagccagtttttaaataacgatgattttactcttgattttactattattaccattttactcttaatttttacgattgttaccattatataaggatgattttacacttgattttaatacagactagtgtaaaatatggacaagtagaattcacttttttttttttttactggttaaatatatttattactaaataaatgtcttttgggggcatttttcttccaggtcaaagttaatcgaagtgagtgctgttcagcccaacattgccaacttcgggaggtccttgctgggtggctactgctcatcttatgtgcctgactttgttcttcaaggaattgggagtgatgagaggttccgtcagtgtctgatgtcagatttatctcatgctgtgcaggtgagtgaccttcactgtttttgagtttatttagaagaaactctgttaagcagcagaacccaaaattgccttatatttttggtcatactttttacaacacaatcattgttctctgaatccatcattttatattcagtgcccgtatctttgtatctgtcactgtgaaagcaaataaagttccagaaatctatccacatggatatctgaaatacagaaagtactttatgtattcatggatgtccatcaactaggttatttatagtatcaaaaatttgcaagtgcttaagtttgaatggaattattttcttaatttccttttcagattactcattgcttacatatagaagtggggttggcttttgtgtattgatcttatatcctttggtctttctgaaactcttattagtctattcatttttctgtataggttccctaaggttttctacacacaggctcatgttatcagtgaacagatagttttaaatctttcttaacaatctggatgccttttgtccccgctgcccccaacttttttttttttttttgactcattgtactggctagaattttcaatacaatgttgcatggaagtggtgaccatggacatcgttgccttattcctgatcttaggggaaagacattgcatctttcatgattaagtatgttgttagttgtaaggtttttgtgatgccctttattagatggaagaagttccctttttatttttattttgtttaaccgaatacttcttttagagacaggcagttctcttttattcctagttttgagacggtttggttttttttgtccatcccttaatcatgaatgagtgtgggattttgtcatatgctttttctcaatgtctattgagattgtattgtcgtgtcatttttcatctttaaactattaatgtcatggatttcattaattaatttttagatgttaaaccaaccattgtattcctaggaagcaattcccactctgtcatggtatataattttttttatgtgttgctggatttgatttaccaatattttattatggacattggagtctatattcatgagaaatattgctttttagttttcttgtgatgtctttgtctagctctgatatcaggataatattggcacatcctctattttctggaagagtttccagaagattagtactactttttttctctaaacgtttggtagaactcactagtgaaaccatctgcatccaggcttttaagaataagaatattttaaattgctaatttaatttcttcaccttttatacatttagattttctatttgtttctgagtccattttggtaatttttgtcttttaggaatttattagttgcatttaagtggcctaatttactagaatcaagttgtttatattatacacttacaatccttttagtttttataaggttgctagtgatgtcccctcttttgttcctgaattttgtaatgtgtgtttttgtttgtttgtttttcaaatggtgagggcttctccaaagagaagttcattcgtggtttcacttaaattgtatatattttttgcccatatacatcaaggattagcaagctatggacagtgggccaaattgtcctgctttttatagatgaagttttattagaacacaaccacagtcattcatttatatgcttctggctatgttcatgcctaacagcagagttgagttattgagacagagacttttcagcccccaaacctaaaatatttcctgtttgttcttattttattttatttcatttttcttgagacagagtctagctctgttacccaggctggagtacagtggtgccatctcagcttacagtaacttctgcctcccaggttcaagtgattctcttgcctcagcctctggagtagctgggattacaggtgcccaccaccacacctgcctaatttttgtatttttagtagagatgaggtttcaccatgttggccaggttggtctggaactccgacctcaggtgatccacccacctcagcctcccaaagtgctgggattataggcgtgagccaccgcacctggccaaatctgacaaatttcgatctgttgtattttcagtttcattcatttcaaaatgtttttacattttgcttgtaatttctttgacttatgagttatttagaagtatgctgtttaatttacaaatatttatggaattctcaaaagttgttttgctgttggtttctaatttaattccattatggttggagaacctactttgttcacctcttgtaaatttattgagactgttttatggcacttgaaaagaatatatattctgcttttgttgaaatgttctatagctatcaggtcaagttagataacctttagataatagtcttaattaagtcttttatgtccgtgctgattttcagtttgtttctgccatcaattattgagaatgaagtattgaagtcttcagctattgtttggttgaattttctatttctcccttcaattgtacatatcactttaatactttgctttaataacaaaatctggccacctctcaatttaaaaagttaataaagaaatagagaggcccggaatggtggctcacgcctataatcccagcactttgggaggccgaggtgggtggattacttgaggtcagtagtttgtgaccaccctggccaacatggtgaaaccctgcctctacaaaaatacaaagattagctgggtgtggtggcatgtgcctgtaatcccagctgcttgggaggctgaggcaggagaatcacttgaatccaggaggtagaggttgcagtgagccgagatcacgccactgcactccagcctgggcaacagagcaagacaaccatttcaaaacaaacaaacaaacaaacaaacaaacaaaaaaacagaagtgaagaaagccaagtgggaaattatggatgagaaaatgtggcttagtgagcaacagtcaattgttagccaataaggtttaaaccttctgtgtctgtagaaagttacctaagttgtaaagtttggtgttttattgtatagtagagaaattatggcaaatatagataaaaacaatttgtgagaaaaacttatcagaacttgtgatcttcatatttaaaggctagtttgcccagcttttgaataccaatcaaataaatatttattgacctactgtgttctgaatatagtgccagtactccaagggatatatgtatgaaaaagaaaaagtttctgacttcaagtttttaacttagcaacagagaaaataaggccaagtgtatgaataaatgtagtataaaacataacaaaagtagtgcctgaggaagatacttgaatgtattattgcttcaaaggacagattttttattagttggtggtatggatgcccttcagggtaaaggaaccgtttctagttttttcaatgcttccctcccaatacctgatgaagtgcctattatttgttgaattacttggttaaggaattgtatatgagttcttctaatgcactctgtgtcttctaatgcattcttatctttctttatgtctgatcctagttgcttagtctcttttcttctttcatctgtacccatcgccaaacacagtatcttgtgactttctctgtgaaagcctggcgttggaaaacattgctgtctcctgctgaagataaagacaacattttgattttaagggtttcttcctgctattataggatgaataataataatagtatttagtttttattgttgccttactgtgtcccaggcacttaagtgtactatttcacttaatcttataataatcctttgaggtacttattattgttatctttgtgtttcagatatggctcagagaagtttttaagttacatagatggggaatggcaaaactagaattcagttcttaactgcctgttcttaagctgctatgccatactgttactaaaactgatgaacaaagagtaatacaaatagcaaaatcaccattacaaagttataagacttttatattagtggtcccaggtctgttgctcttggattccttccactatggtaaaaaggaaggagctatttgtctttccccctctgttttagtaattgggtttctagtctttccttctcatattttcatttagtcatgtaagtatactatcaaagcactattatagaaaaatttgacaaaaagaaaaataaaataccttcaatctcagcactgacaagttgttgaactttgttatcaatcatttttccaaagcatgtataggatttctaaaaaaattatttggccaggcacggtggctcacagctgtaatctcagcactttgggaggccgaggtaggcagatcatgaggtcaggaaatcaagaccatcctggctaacacagtgaaacctcatctctgctaaaaatacaaaaatttagccaggcatggtggtggagctactacggaggctgaggcaggagaatggcctgaacccaggaggcggagcttgcagtgaggtgagatcacgccactgcactccagcctgggcgacagagcgagactccgtctcaaaaaaaaaaaaaaaaaaaagtattattttaggccaagcgctgtggctcacgcctgtaatcccagcactttgggaggccaaggtgggcagatcatgaggtcaagagttcgagaccagtctggccaacatagtgaaaccccgtctctgctaaaaatacaaaaaattagctgggtgtggtggtgggcatctgtaatcccagctactcgggaggctgaggcaggacaatcgcttgaacctgggaggcagaggttgctgtgagctgagatttcaccattgcactccaggccaggtgacagtgagactccatctcaaaaaaaaaaaaaaacctatctatatatatatatattttttaatccttgcatacttaaagtttatcatatttaacatgaaatttttttatgtgactacatggaaaaacatgtaggaaccttttaatatataaataatggaagtgatactttaaaaaaatacagtcttctgaattataagaggagagtgtcttttctttttctccctgatttttaataaagtagcatttttcttaatatatatttattatacaaaatgttgaaatgtgaagaaagccaaacacaaattttcctaactctaccatcagctattcttatacagaaacttcctccaggcattaggcagcattgtggcttctcataaaacccagaattggccacttattgccggtatatcataagacagaatacttactctaggaaagcctcagtttctttggctataatgaaagtaatactgatgtttgtttaccagacttacactgtgtggtgatattagtcacactgtgctttgcatcttcttgttatgattattattctgtatgtatgtgtatttatatatcatatatatgtctgaagccttatatataaaatgatatgcttgtgtatatctgtgtaaatacacaatatttacacagataaatacacaagcatatcattttatatataaatacacagatatacacaagcatatctttttatatataagtatatatttttatatagctgagtccttatatataaaatatatgcatgtatatgtatttatatatacccatatttttatactctttatgattttatattatctgttttaaattctgcttttgttacataatagttaatgtaagaatatttccccatactaacatagtgtgtaaacattatttttaatgtatatggattattgcatggttttgtcatagtttatgtttctcaccattctcctattgctctttttttttttttttttttttgagacagggtcttgctctgtcatccaggttagagtgcagtggcacgaacatggcttactggagccttgaactcctgggctcaagcaatctcccatctcagcttgcccagtagctgggactgtaggcacatgccagcatgcctggctaatgtgtttattttttgtgaagatggggtctcgctgtattatccaggctggtctcgaactctggagcctcaagtgatcctcccacctcggcctcccaaaaatcttgttctaaagagaaagccaagtttcacctttgcattagtgtattagtaacattaaacccaattcttaataaaaccttataaacaaactgattcaatcttagtttaaccataaggtaaaattttaataaaccttttttaatcttttataattttctgttaagcagtagatcaattcactaagaaaaccatgttattcagacatgtgagcccagattttggccctgcattagtgtgctcttatttcagtgttcaacatacagaaaaattaaataatccccttcaaatcttagcaaacttgcttatacctacagaacttcctttatgagatcaacccttcacaaaccctctacaccttgcttaaaccttcagttttgtcccattactcttttaggttaagacaattgttaaaaccctctgagctagacaaaatttcattccctttaacaaaaaccatattcccatgccttcttatagcctcccatcaaaaccacattcttttttccttctacaccttgtatataaaactgtttttccagtagtctcaagtgcatgctgcactgttaacttttagcaaattttatttttggtgagaaacctagtaaacaagcaattttaaccatgtataatattgcagaacccatgacttttcccagcctagccaggggacctgcctaactccatatgtctccaggccttacctagaatctattggctgtagaacagacaaacaattagtaaaagtcacagaagcagtttatcaccttaaagcatccagcaaacagtgtttgacctgccaaatttagactaaatatataaactttgaagacattttcattttactttaccaataatcttcttttttatttacaaaaagattattagagtcatgagacctacagggattaaagtttccatttttctgacaatgtttgattcaagcgcttatttttctttaagccaattaattggagctgtatatataaacatcacacacatgacacatataaatacacagaaacagagaatcaagaaaaaattccattgactgagaagcttttgaagggaaggctggagctttcaaacaatatctgtatatatagcccaaatatcagctatttaattaagtcgatttctaactgtggagctctcaagagaaaaattcttttaaaatcttttattaccagatttcagtgaggacaaactctgacttctgaatccttttactagaggtaaccttctatgtgaaatcaataagccttaactaaggggatgacttaaacagggatgtaggaggtgtctccaaagagatggtaaatgatttataagatctagaatatccccaggccagccgcggtggctcacacctgtaatcccagcactttgggaggccgaggcaggtggatcacctgaggtcaggagttcaagaccagccttaccaacatggcaaaaccccgtctccactaaaaatataaaaagtagccatcaggcacaatggcgcatgcctgtaatcccagctactcaggaggctgaggcaggagaaccgcttgaacctgggaagccaaggttgtggtgagccaagatcgtgccactgtactccagcctgggtgacagagtgagacaccatctcaaaaaaaaaaaaaaaaaaaaaaaatctagaatatctccaaaggtagttcagagaaaagaaaattcaagataagaaatgagaagctgtgcatggaagggaaaagaatcaataaatggcaaaagttccacaagtattaaaccaaaaaggacttgctcccaaagcctggaattgaacccaagccacccaccactgtgggagggcaaagcctttgcaactgacctacagtacaaggtgactgctgttgtctttcccagaaggagtctagagcattttcaagcttgcaaaggacttcaactgctcaagagaattttctaagactaaccatgtcattattatgcatctttcttttaatttaacctttttctttcaatgaggtagtcagttccaatagtgacacaatctaagaagcctattaaagtttagatgataattttccagttttttttttcctttctttttacattagaagcaaaaggtatctagggtagaagaggcatctccatgatccccaagaattcactctcagaaatgggcttaagatagcaaaagatgacaaatgccctatagagatgggaccttttcagacaaaactcacccaagggcttgacacatttgggatgaagaatgtgctgactcatctcagactcccagccctttcggattgggtgcctgacatgaacttgaaaattcctgttctctggatggtggagaccaagagagagtatccccacatggtcacaaagtcatgctctcaaggatgtaaaacaagattagagggaagcctcatttagtttttgtttcagggacccacagcaaagtttataactgacccatcgaaaagtacaccagaatcactacagcctcagattagcctctcacagatcctttttcttattaataaacagtgatttttaccattcacttatctaatttgcacagagagagagaggccagaagcctcactggtaagaaattcttaccttttgttggcacggcaggtttctgatttccctttccctcagctgccctggcgatgttgctcaccgcaccatagtcacaaaggaaaattacttttgtgtgtttcattgaaccataggcaaaaacctctcaactttgtaagatgtcacccaataggctgtgtgggggagcgagggagaggggcgagagaccatcaaattaacattctttatctcagcttggtgaagcacacataacaaaacagacactagtcactttgctcagcacctaatactgacttatcaaggctcaatctttttctagtgtgcccctgtcatctttgatcccctcaaggtagggagggatgacctctgactgggaattcactgggtgatgtctggacaacatgaagagcagacagtcaccccaggtcaaacctgttgaacttcctttactgctcagcaaatgtgaccaaataaggttctccgagttaggtctgctggacttccatcaccaattcctttagagatcccctctagatgtacaaacacacacacacacacacacacacacacacacaaaacaaagacaagacggacagaaggtctcccaaagcaagatccctgagcaagaattctaagagtatgcttctattctctgagaaacctccctgaaatcttcctgattgaggagaagtctccccaaccaagactcttcctactgattagggagagccaattgaaaccgccaaaggggccaaacttagatcccttaagaagccaaaccagtcaggagaaggaaggaggcattggcaccacctagaatacccaccagaccagtttagagatgtctttacaggaacaatttctctactgcaattgaatccatgcaccatgggtcagcagtgtgttgctggtagagatagtgccagcgtcagcccccagtccaagagaactacgcagccacttgggctggcctctggatctattgccggtgggggactaccacaccgtgggcaggtagccacaagggtgatcccagatgagcccccaaatttgtaactgcccaggggttcttcctgcccactgcataaagactatggtattgtagtagagaaaaagttcaatagacacaaggccagccaccccacatgggagatggagttcatactcaaatcatctccttcaaagcttgtaggttagggatttttaaaaggcagtttggggaaaggggtgcggtggccaggtaacaggtgcttacggctgatttgttggggcagaaataacatcatagggggttgaagctatcctactggggccaaatcgcttctggatggggctacaggagtgggttgtcagtccaggtggagccaagggtgtcagacatgcaaaaaacctggaaagatatctcaaaatgccagtgcacaatagtggtgttatttgcagttgggaaagtttcatttcttataatctccagaataatgtctgtgccttagcagaactcaaactcctctcctactttcagcctgatggcttccttttagctttacaaaagcagttgagttttgggcaaggcctattatcatttaaactgtagcctggaccaccaagactgtgtccaccctgcaagcacagagcctcaccctcaccactctgccgcccatccacacctgccaccagttcaccatggataatgatattgctgtgcttgtcgtcgacaatggctctggcatgtggaaggtctgcttcacgggcaacgatgcccccgggccgtcttcccctccataatggggcacccgaggcaccagggtgtgatgatgggcatgggtcggaaggacttctatgtgagcaacaaggcccagagcaagagaggtatcatgaccctgaagtaccccatggagcatggcatcatcaccaactgggatgacatggagaagatctggcaccacaccttctacaatgagctgcatgtggctcccaaggagcaccgtatgctgctgactgaggtccccctgaatccaaggccaaccacaagaagatgactcagatcatgtttgagaccttcaacaccccagccgtgtatatggccatccaggccatgttgtccctgtacacctatggctgtaccactggcattgtgatggactccagcgatggagtcacccacacagtgcccatctacgagggttacgccctcccccgtgccatcctgtgtctggacgtggctggccgggaccttactaactacctcatgaagatcctcaccgagcacagctacagctttaccaccatggccgagcgggaaatcgtgtgtgacatcaaggagaagctatactatgtcaccctggactttgagcaggagatggccacagcggcctccagctcctccctggagaagagctatgagctgtccgatggccaggtcatcaccattggcaatgagctatcctgctgccctgaggcgctcttccagccttccttcctgagcatggaatcctgtgacatccacaaaactaccttcaactccatcatgaaatgtgacatggacatccgcaaagacctgtacaccaacacagtgttgtttggcggcaacaacatgtaccctggcattgcgaacagggtgcagaagatcgtcactctggtgtggatgggcagctccatcctggccttgctgtccaccttccagcagatgtgggtcagcaagccaggagtatgatgagtctggcctctccatcgtccatcgcaaatgcttctaggcggactgttacttagtcgcgtttcaccctttcttgacaaaacctaacttgtgcagaaaacaagatgagattagcatggctttatttgtttttttgtttttggtggtgatttttttttttttttttttttttttttttggctagacccaggatttaaaaactgggacagtgaaggtgacagcagtcagctggagcaagcatcccccaaagttctgcaatgtggccgaggactttgattgtacattgttcttttttctaatagtcattccaaatatcgtgaaatgcattgctacaggaagtcccttgcccccctgaaagccaccccatttctctctaaggagaatggcccagtcctctcccaagtccacacagggaaggtgatagcattgctttcatgtaaattatataatgcaaaattttttaatcttcaccttaatacttttttattttgttttactttgaatgatcagcctttgtggccccccttttgtcccccaacttgagatgtatgaaggcttttggtcacccttggagtgggtagaggcagccagggcttacctgtacactgacttgagaccagttgaataaaattgcacaccttaaaaaaaaacaaaaagctgtagcctaaatgtcttccgaagttagcttggccccataccccaggaataattaagggaaaggccaaaatgggttttgggttagcttagttcactgttataatgttctcactaatataacttttgcaaaggcggtttcagtatcatagaagggcccatgtggtaaaagaaataaaaatcagtcttgaataatatgaacccttctgctagattgtctaacgtcaatttgttttttggccttgctgcttctacgtcttgttcctcattgtctggcactagtttggaagcactcgtctctatcgagttgtcttttgttcattcctctggtatggtgtctgttagctcttgaatttctgcaagatccatatctttttttttttttttttttgagatggagtcttgctctgttgcccaggctggagtgcagtggcgtgatcttggctcactgcaggctccgcctcccaggttcatgccattcgcctgcctcagcctccccagcagctgggactacaggcacacactgccacacccggctaatttttttgtatttttagtagagacagggtttcaccatgttagccacgatggtctcaatctcctgaccttgtgatccgcctgcctcggcctcccaaagttgcaagatccgtatcttgaaagccttcacccaccgttttttttttttttttttttttgccttattttcaagctctttcatcatttccttgatgggctctgttgttaagttctgtgtgcaacatctggacacagttttctccagctggaagttattgtttcaggcttgatggctttcatggctttttctgtaacagcaatggcatcttctatggcgtgattcttcggactgtcatgatattctctccactggggttcttttccatagcactgacaatcatttttatagaatattgtgtttaatggtccttatggcaccctgatctagaggctgagttagagatgtgtttaggggcaattagactacttcaacacttgcagtgttaaactcatagggttctgggtggccaggggcattgtccaacataagaactttaaaaggcagtcacttactggcaaggtacttcttgattttagaaataaagcatgggtggggccaggcgtggtggctcacgcctgtaatcccagcaccttaggaggctgaggtgtgtggatcatgaggtcaggagttcgagaccagcctggccaacatagtgaaaacccgtctctactaaaaatacacaaatgagccaggcatggtggcaggtgcctgtagtcccagctacttgagagtctgagtcaggagaagcactcgaacctgggagttggaggttgcagtgagctgtctgggcaacccagcgagactctgtctcaaaaaaaaaaaaaaaaaaaaaaaaggcatgggtggattcaatccagaaaaagagtttttgtttttcaggctttcttgttctactatcagaagactagcagggctggtgtttatcttttttccttcaaggtccagaggttagcagctctttatataagggtagttctgatcttaatcatgactgcatttacacaaaacagtggagttagcttatcccttcctgccttaaatctcggtgcttgctcctgttccttactaataaatgtactttgtggcatctttttccataataggattctttcatcagcaataaaaacctgttcaggcagataccttttgtcctctatgattttcttgatggtgtccaagaacttgtgtattgcctcttggtcagcaaaagctgttatcttgatattttttaagctaaaactctttctaaaattatcaaaccatactttcctagcgttaaattctccagctttagatcctttaccctccttttgctttaagttgtcatataatgacttcatctaaaaaataatattagagtctttagttagagctttcttacagcaaccctgtacccacataagagctgcattttcattatgagatttaaaaggtattctgcaaaagtacctggttttcacacctagtggcattgctgcaatgacagcttcacaaatttccttttcttattttacaactgtcctcatggtggattcattgatcttgaaatgatgggtaaccacagctacttaatctatggtccatatcaagccattcaagtttttcttgtaatatcttaacttctctctacttttcttgagagcatttccagcatcactagtggtactccatgtggatcccatgatgttattcagggtttgctgtatcacactaaccatgatggaaaatacatgagaacctttaaacaccagttttgttatctttttggctttttgttttattagagacagagtcttactctgtcacccagactggagtgcaatggtgcagtcatagctcactgcagcctcaaacacctgggcttaagggatcctcctgccttagcctcccaaaagagattagttttttttttgttttgttttgttttgttgttttttgagatggagtcttgctctgtcacccaggctggagtgcagtgacgcaatcttggttcactgcaagctccacctcccgggttcacgccattctcctgcgtcagcctctggagtagctgggattgcaggcgcctgccaccatgcctaactaattttttttttttttttgtatttttagtagagacgaggtttcactgtgttagccaggatggcctcgaaaagagattagtttttaactgagatatgctgtttattggagagcggaactgctcctgcagagatgattaagttggcagggtgtttgaagtacatacttgcaacacttgagctctgggcaatagcaacaggaagtagctacaaaactattatagtagtgcagtaggtactacagctagttttatgcagttatgatttaatactatacatttgttaacatttctctgggctgtgaatgtcaccttgtatgccttgtaagtgtgtaagtttttataaattttaacttcttatagtagatttgtattttatagtagtaaatgataaaatatactacctacatttttttgtttgtttgtttgttttgagatgggtcttactatgttgctcaggttagtctctcgaactactgggctcaattgatcctctcgcctctgcctccccagtagctgggattacaaatgcacactactgtggcatgcatccacatatattttatgtattcatgacatgcctaacttttcttattttccgtatttctaggctacacggttttgtctaagtttttcaaattgttgcaaatttccaaaaactttacccatatattatattggaaaaaattggcatctaagtggacctgtagttcaaacccatgttgttggtcagctgaatatatttcacaatatcacagatgtatatatctttgccaaaattatatttccataattaagtgatgaataacaaagtgatttatccctggcaagagatgaataaatatttgaatactgttttataaaaaacaaatataaatttggggctccatggaaaatcttcccaaggtatatttttggacttttcctttgccattctcttcttatttctcaatatcatttctcacaaatgtagccatttgcatctacttctatttctgattcttactcttaccgaattatccatgttcttctcccatttttttcaccagtagtcctatctatacacttcaatgtcatagtcctatgtccctttcactgcgaaactccctatcacacagatcccacgattgccctcctctacttcccagcacttggtttctgcttcatcagtaacacattttttttaaagctagatgtatttattttgatctccctcacaagtctatgagttctgttgtctttgtttctttagtttccaggaaagagctttattcagagtagttgttcattaactaggcaaaggaatatcatttgaggatgccaaacctgggcttatccaggagtaaacttttgtccttattgtggtaccttatcctaattgtagtaacattaaaagttagagaggaaaagccattggtctcagtatttcatattatagttttaatctcagtcttgttgctgctattccatttggccagtagtaaaaaaaaatccttacctttccaaatacagaaaaatattaaaggtagggtcactatctgtttctggcagacatgctctgtacttaattgtcatttttggtctttgtttgtaaaccgggggaaggtaaggacatagccatatgccttgtggctctttcatgactatgtatatatgagtcaaaatattatttttcactgtcttaacatttttaacaatgaaagtaaatgcttgtgataaaaattcaaacaataagggctgggtgcagtggctcacgcctgtaatcccagcactttgggaggccaaggtaggtggattgcgaggtcaggagttcgagaccagcctgacctacatggtgaaaccctgtctctactaaaagtacaaaaattagccgggcgtggtggcacacacctgtaatcccagctacgcaggaggctgaggcaggagaatcacttgaacccgggaggtggaggttgcagtgagctgagatcacgccactgtactccagcctaggctggtgacagagtgagactgtctgaaaaaaataaataaaaatttaaaagttcaaacagtataaagatatacagagtaaaaagtagaagtccttcatactcttaacgttcttgcttcacagagatcttcaatacttcatacttgatttgagtattttctttcttttttctatacactttcatttagatgtagatctgaatttttagaaacataactgtatgtatagtgactttttttttttttgagacggaatttcgctcttgttgcccaggctagagtgcaatggcacgatctcagctcactgcaacctctgcctcccgggttcaagccattctcctgcctcagcctcccaagtagctgggattacaggcatctgccaccatgcccggctaattttttgtatttttagtagagttggggtttcaccatattggccaggttggtctcaaactcctgaccttaggtgatcggtccaccttggcctcccaaagtgcctgcattataggcgtgaactaccacgcccagcctgaattttttttttttcacttaacaatgtgtcttggagaaccctgttagtatattttgatgtgtcccatttttaactgctgtattcatactctggacagatgtcttagtcaaacagaaaaatctaattcatgtaggcagcaaagcacttcatgacatcaaggaataccttctctggtgctgagggatattaatgcctgacatattgggatagttagcacagaatcttaccattgacttatttgtgtgaataagtcttgtttctttgttgttgttgttgtttgtgttttttttaagacagggtcttactctttgacccacactggagggctgtggcacagttttagatcactgcaatcttgaattcttgggttcaagcaatcatcccacctcagcctcctaagtagctgggatcacaggtgcatgccaccattcctggctgattttttagatttttttgtagagacgaggtctggctatgttgctcaggctagtctcaagctcctggccttaagcagtcctcccacctcagcctcccagtgtgctgggattatatagatgtgaaccatgtcatctgtcctgtcctgtcctgttctgtttttaaaatgtttgtctcaggccaggtgcagtgtctcacgcctgtaatcccaaaactttgggaggccgaggtgggtggatcacaaggttaggagatcgagaccatggtgaaaccccatctctactaaaatacaaaaaattagtcaggcgtggtggcgtgtgcctgtagtcccagctacttgggaggctgaggcaggggaatggcttgaacctgggaggcggaggttgcagtgagctgagattgcaccactgcactccagcctggctacagagcaagactctgtctgaaaataaaataaaataaaatgtttgtctctttcagggtaaaaaaacattttctttcaattgcctggcacatagtagacacttaatacatttgtcaaattaatgaatgatcaaaagactgttgaaagttaagttctggactaaataatacaaagtccttgtaatgaatacaaagtctcaatctacgatgatatctataatatgtctcagggtatttgttaatgagttaattattcttcttggtcaaggagatattgaaatattgaagtttaatttttttttctgtttttgtttagtaaaccttcattgctgaattaccattatctttggaaacttcatttgctaaacataagatgaattattcttttatttccagcatccagttttggatgaaccaatagcagaagctgtctgtattatagctgacatggataaatggactgttcaagtggccagtagccagagacgagtgacagataataaattgggaaaggaagtattggtttccagtcttgtttccaatctgcttcattccacacttcagctttataagcataacttgtctccaaattttgtaagtatgtgtaacactgcttgcattactttaagcactgcttaaagctttcatcattgttttttctgaaaaaaagctgttagggactgaatgtttgtgtcattacccgaactcatatattgaagccctaattcccagtgtgacagtatttggagataggatctttgggaggtatctaaggtaagattagatcttgagggtggggtgctctgatggtattagtggcctaagaagatgaggaagagaaagattgttctgtctccaccatgtgaggacacagtgagaaaacagctgtctgccagcaggaagagagcccttaccagaacccaaccatgcttgcaccttggtcttggatttgtagcttccagaactgtgagaaaataaatatctggggttttttgtttgtttgagacagtgtcttaatcccatcacctgggttggagcacagtggtgcagtcttggctcactgcagcctcaacttcttgggctcaggtgatcctcctgccttagcctgctgagtaggaggaactacaggcacgtgctaccacacctgactaatattttgtatttttttagtagagatggcattttgccccattgcccagactggtctcagacttctgggctcaagtgttcctcctgccccagcctcccaaagtgctgagattacaggcatgagccaccattcccagctatatatctgttttttttttttaatccatccagtctatgatactttgttatggcagcccaagctaagacagaaggggttgtgtacatgtctgtatgttctgatttcagcagccagaatttttgatcatgtgtagtatagtcatgcaacatctcccagctttgtgtagaatgccagtacattctggatcctcattgtcatgtcaggacttttattgatctctttataatactggtaacctctttctaaagatcccatttccaactttcaaggttctttctttcacttattaggagaactataacataccatagttaaaaagctctgtagttcaagatgataaaggatatctatgacaaacccatagccaacatcacactaagtggtggaagactgaaagtatttctctaagattaggaaaaagacaataagacccactttccctacttctgttcaacatgctactgagagttttagccagagcaatcaggcaagaaaaatacaaaagacttcaagattggaaaagaggaaataaaattatctctgtttgcagatgacatgatcttctcgtacatagaaaacataaagatcccacagaaaactggtagagctaataagcaaattaagcagatttgcataatacaaaacccataaaaataagttgcatttctatatacttattcgaacaatgaacactctgaaaagaaaattaagaaaacaattccacttacaatagcaccaaaaagaataaattacttaggaacaaatttagggagacaaaagactcccttgtacactataaggtataaaacattattgatagaaattaaggacatatataaatgaaagcacttcccatgctcatggattgaaagacttaatattattaggatatcattactactcaaagttatctacagattgaatgtaatccctatcaaaatccaattgatattttttgcagaaatagaaaaacccatcttaaaatacattaagaatctcaagagaccccaaagagataaaacaatcttgaaaaacaacagtgttggtagatttcacatttcttgatttcaaaacttattacaaagctacagtaatcaaaacattgtgctactggcataaggacaggtatatagaccaatggaatagaatggagatcctaaaagttaaccctcacatataagtttagttgattttcaacaaaagtgccaagaccattcaacagggaaaggagtcttttcaacaaaagatgctgggaaaactggatagccacatacaaaagaattatgccacgtacagaaatgaactccaaatggatcaaagatttaagagctaaaactataaaacttacaagaaaacctaggggataatctttgtgacattggatatgacagtgacttcttgaatttgaaaccaaaagcataggtaacaaaagtaaaaaaatagataaattggatttcatcaaattaaaaacttttgtttattagctatcaacagagtgaaaagacaacctataaaatagaaaatatttgcaaatcatatatctcaaaagggattgatactcagaatatataaataactcctacaactcaacaggaaaaaaataattgaattaaaaaatggcaaaggacttgaatagacgttttgccaaagaaaatatacaaatggccaataagcacatgaaaatatgctcaacatcattagtcattagggaaatgctaataaaaccacagtgagctgccattcaatacctgtaaggatgactatgataaaaagaatccacaaaaaatagtaagtattgaccaagatgtggtgaccttggaaccctcatgcattgttgatggtaatgtaaaatggtgctggagccgtggaaaagtttggctgttcctcaaaaagtttaacattgtatattaccatatgatctattaattccacttctgcgtttatactcaaaacaattaaaagcagggattcaggcagtatatactcttgttcatagaaacattattctcaatcgccaaacgttagaaataacccaagcatccatcagcaaatgaatggataaacaaaatgtggtataatatatacaatgcaatatttattcagccatgaaaaggactgaaattctaatacatgctacaacatggatgaacctcataagcattatgctaagtgaaataaactagacacaaaaggacaaatattgtatgattccacttatatgaggtaccacaaataggcagattcatagagactgaatctaaaatagtggttaccaggggctgcgggtaagaagagaataaggagttattgtttaatgagtacagagtttttgtttgagatgatgagcacagagtttttgagatgataaaatgttctggaaatggatggtggtgatggttgcacaacatcgaatgctcttaggactatataattatatactgtaaagtggtcaatatagtaaattatattacatattttatatctacatatattctgcagttaaaattttcttatggcattatcagcctaaagcattgtgaaaaaacatacactataaaaccacaaccatttggttgtgttttacaataataaagtagatttttattaggagcttttaataactgattttcattggaaaggaacactctgtatgaatttaatgtttagcacctgaaacttctgttttttcctcaaacatgtttagcatcaattcacatgataaatcacctattttagtaaattgagcaagttaattgacattaaacaaaatgtatgtgtttcaggtttttttttttttgtaacttttgtcacccaggctgaattgcagtagtaatcatggctcaatgcaccctcaaaacccctgggctcaagtagctaagactacaggcacgtgccaccatgctcggctaattctttttttttttttttttttttaatttttgtagagacagagtctcactgtgttgcccaggctgatctcgaactcctggcctcagatgatcctcctgcctccacctcccagaatgttgcgattacaagtatgagccaccatgcccagatgtgttttaattttcagtctttcagcttagaaattggggaaccacatagcattctttgtgaacttttgcaaactgttttttattctccacaggagaatacatcctttcctatgtaaatacatttgaaaagtattaatttataaaaattttatatttatcaaatttgaaataaaaacatagtgaaaaaagttttggaaatggatagtagtgacggttgcacaacattctgaatgtacttagtgccactgaagtatatttaaaaatggttaaaaagggctggacatggtggctcacacttgtaatcccagaactttggaggctgaggtgggtggatcacctgaggtcaggagtttgagaccagcctggccaacgtggtgaaactccatctctattaaaaatagaaaagaaattagccgggtgtggtgcgcatggctgtagtcccagctactcaggagactgaggcaggagaattgcttgaacccgggaggcggaagttgcagtgagctgtggtcgcgctttgcactccagcctggttaacagagcaagactccatctcaaaaacaaaaaacaaacaaaaaatggttaaaagggcaaattgtatgtgtatttttgcacagttaaaaaaaaaaaaagacgctgtagaagctaatctttgatatgagccagaaaaagtttcacttctctttttagctaaaactacatactttaaaaatgtgctccaaattttagttcatattgaaataaacaaacagaattgtcaaaaacattatgttttggagtttgccatgactgagagttgcaaactgttttctgacctggttcttggttcctccctaactgcagtgtgtaatgcatcttgaagaccggttgcaggagctatacttcaaaagtaaaatgctgtctgaatacctgagggggcagatgcgtgttcatgtcaaggagctgggagtggttctggggtatgttaatggtttcttttttggctttgctttcattgccctgtcatcaggcaaggaattttcctcagaattgccctttttccttttacgtgtcttctcctattagaagctggaggctgttatcatttaggttgccctgtaccatgtaatagcaggttccctgtcatccactaatctgaaaggcattatcccttgtgccattacatacagtaggttgagaatataatcacagtgaattaaaatctgaatttttgtctcagaaacataagtacatactcatttattaaatatgttgcaaactcattattccaagtatctgccctgccttccacatgagctggttgaggtaacagaagtctgtagatggtaatacgttatccatatattactccttcccccccattaactatatattatatctgtctactctgcattattctctggcagaaaacagttatcaaaaatgcttactgaaggaggaatgggaagttggtagggggggcataatatagccctatttcattatgttctgtggtcacttttcttgtgttctctggccactttaggtgggttcatatgaattatttcttgaaatgccattaaagaaagcaaaacaagctagaacttttatctaatttggcttttatgatgggaaaagaaaccaatatcactgagaacctactgtatgtcaaaccacatgaaaattttttactagtgttatttcttcattcttactatcatcctgcagtgtgtaggcagtgttatccaggttggaaacagatgattctgaagttaacatgccagatgtcacacactggtaggactaattagggatttgaatgactctatatcttttttactttagaccctatttatattctgtagtaccacactgttggtccagacttgatgattttgacttgagttatacagagagaattgttctccagtatttggaaaatcagtaacaggatataaccttgtttttctggggagtgagctgtgtgtttaatgcctttatgtaaaaatatttaagacaagttttaaaaagtaacataaatgtaaccaaaattcacagtgcattttggcatacaatgaaaagtaagtcattgtcttcttcccccaacttccaacccctactcaaacactgttaacagattgttttgtagaatttttaaatgaatattatttaaaaatctaagttgagttatactcttgtgtccttgtacaacttgccttttactatatcttgaatgttcatataagcacagaataatctcattcttcctaatggctgtctagcattcccttatatgttggaatttagattatttttagttttttgctactataaaccagtgccagactgaatataagtctctgacatttgtaggataaattccttgaaatagaatttttggttaaagggcctgtattgatagatagtttgacagattatactgaatactctccagaaagtttcaaaatgaattcccacaaacagtaagaggcactcttctcagtactggctattaccagatttgatctttgctaggctactatctaaaaaatggtatctgattttattcacatttctctaaccatgagggagtctgattaatattttctatgttggttggccatttttcttttcctataaatttgtggtaggatgtattttgaagtagctcccattacttccaatacatcttattatagaaacatttgaatccaaaacaatctgggtacacattattattctttgtttttttttttttttgagacagggtcttgctctgttgccctgctgttggtacatagctgacttcagcctcaacctcccaggctcaagagatctttctgcctcagcttccagagtagctggtaccacgggcacacaccaccatgcccagctagtttttaaaatttttttgtggagacagggtctcattatcttgcttaggttggtcttcaactcctgggcttaagcgatcctcccaactaggcctcccaaagtgttgggattacaggcacgagtcacctcacccagctattattacactagattgcagttgttagtcattgtgccatgccccagttcatgttccatcagcatgtcattgagacacttttctacgtttatgatgttgttactcgtatctgtagttctgtgttttatttactgagaatttttcctttcggccagagtggcctagctccttaaccgttgaggtatagtgaccttacagttggtggtcattgcctgtagagttcatgtcctcagtacagaaaatcaaaactgacatttttttcccctttatttcaggattgaatccagtgatcttccacttctggctgctgtagcaagcactcactctccatatgttgcacaaatactcctttaatatacctaaaaattgttagaaattggtgggaaaataggtagaaaccaaggaagcagacacaacatgcatttatggagattctttttcccttttagacttccatctgaatgagtcagtcaccagggtattctgcatagcattgtatattctgtgtatgtcagatggctttttctttttgactggacttttgggtggtggtagatttttaaacaaatgaaattaaagcaacaataattttgaagcatttgaaaaagccaaagtgtacggtagaaatttctacaaaatgaatattatcaagagtttcatgtgatcactgcagtgttgtcacagctcataaatagcaacagtgtctcatgatttaatggctcagaaatagttattcattagtttttaatttttaatttctaaggtacagagatctataaaaccttgattatttgttagttttgcaattcaaaacagctaatgtctggttatttctcaaagtaagtattttaaacagcctgttaattataagaaactcagaataatgagtgtaaatgtgttatgttatccacccaagtgtacatatgtacctatttttttttaaaaagcagaaatagaaatacaagactggtaaacatgcctttaaaaatatatatattttcaactagtattgtctataatgctgaaatattacttattggtgatttttctgtttcacacactctaaaatataagtaaagccaaccttttttttaaggctgagattcccaaaatgagaatactactttataccatttgtttataagtatgaactgttcttataaatattaatatttacatattcactaatttaacataaatgaaaattaggattaaaaattgcaccaaagcatcggcaaaaacaatactatattctttaaaagtgctcaggtagccaaggcccttgcttttggtatcaaccctcatgaacccataggagctgaatatttgtttcactgcttaataatcctcaatttacactattcataactcttaaaattattctctttttttctaagagtccctcccttccaaaagtgtatttttttcaaagattttcacttctcaattgttgcctttgtacatactatagagtgttgcttgtaagaaaggctaatatggaaccaaactcttgtaagtaatgtaaatagaaaggtgggtggataaagttttcaatactttctactacctcagtttacttgagtactacattatagtttattctttgcttatctggtctaagagacttttaatgctagtagtaaagttggtttctgctttcattgactattttcatcataatttcatcattgattaaaaaaagaaaaccacttgtttattcagttattaaatatatttactatataacacatccattcttgctgtttaaattttcaatagttaatggaaagttgtctttgaccttgaatttacagcattgggtcacattttgccttgctgtgtatgtattcaagagacttccaactagacaaagaaaaaattgttgttttaatggaatgtaaacctgaaattggtgtgtctgcaatctgtttggcccatgaccttttacctagtcccagttattacctgagtctcccatggatgacttgctgccaaggagtgtttgtggatatattttctttggcttaattttcttattctgtgcattaacaaaattatccagttgtctgattttggaattctatgagtcaatctttttggcagaattcagaatattaaaaagttcatacatttgcgggccattgtacctttttttttttttttttttttttgacggagtttcactcttgttacccaggctggagtgcaatggtgcgatctcagctcactgcaacctccgcctcccagttcaagtgattctcctgcctcagcccccaagtagctgggattacaagtgtgcgccaccacacccagctaattttttatttttagtagagatgagatttcaccatgtgttggtcaggctggtcttgaactcctgaactcaagtgatccacctgcctcgacctcccaaagtactgggattacaggcgtgagccactgtgcccagccttgtacttttttttttttttattgtagctctgtatagcacttggataatgtctgggtgtctccttaaccatcaaactgttctttatttaaaatgtttaattaccgtttagaaattctagtcctcaataagtgggtggctcatgctattgttgttcctaaagctaagctttgctgggaaggaaatgacctatagtttcttaaagaatcattaatccttataggattcctgagttactgttttgttcctccccactgcttcccattcctgagttttgtaattcctaatccttctataatttctattaccttcaccatagtcattctttccttacgcaaagcccaaggaatgagctgctgctactttaaagtgtggtcattatgatgaatgtgaaaagagttttggcttgttctaaataatttttacaagttatggtacagacagttgttacatatcaaaaaaaacctgtttattgaaacaggaaataaaaaagggatcttttacattatagaattaaaactaattttttcttgtatataaactaattggtttgattttaaatatttctggcttttattaatatgtcttaattttgagtttgaaaatgttaagtgcaataaaaacatactagtacagattttgttttgttccaattggcatactctggggatgatcacttaaaaaaacagattttacataatgcctacttctggtagatgtcttatgagattgttctgctttttctaagttacttagatgttggatatgtacatagctgtttcttgttctgtatacatttctcaaatgtacacttgtattataataacctcccagttctaggggatatttgtgcaataaatacacatgtcaacttgatggatggtgttggtctttctttcatatattaaggtatacgtaacatggactgatgtctgtccagacatcagatgacagaagttatggactgatataacttctgtcaaacttagaagtttgacacttctaaggatgtgacctttcctcattggtatttccatattggtaatttaatagaatctacttcatgaggtggttgtgagaatcaagtgaaataatgaatgttaaggatttagctcagtactggcatactccaagtgctaaataatttttggctgctacttttaccagataatctgtccagccttcctcttgtggccccccacctattgttttgcgaatttttagcgtatgttcttatgaataaaaacatagtaacagaaaatataagagtatcttcttacagcgagcaacaaattgaaaatttctttaaatgcttttatgaaagcaaagtgaacccaacaatctaaaaacctagaagttatataatgttaagaaaattgtattcaatacaggctgggtgcggtggctcacacctgtaatcccagcactttgggaggctgaggtgggcagatcacctgaggtcaggagttcgagaccagcctgacaaacctggtgaaaccccctctctactaaaaatacaaaaattagccgggtgtggtggcaggcacctgtaatcccagctactccagtggctgaggcaggagagttgcttctctcctgcctcagcctctagaggttgcggtgagctgagatcctgccactgcactccagcctgggcaacaagagcaaaactctatctcaaataaaaaagaacattgtattcaatacaaattactatactttacaaaaaattggctgattagtttgggttttaatcctctttgttcactgatttgcaagtgactgagcaagtctattgttttcatctgtattgtagggaaatcagctttgtgcctgctctatagcagtgattcatcagtgagtaggcttattggtaagctgtcttgctcaggctaggttgatctgggcagagttagtcctgggggcgggactagaccaggggctttttgaggtacctgttttcatataatactacatattatcactcttacatttaaccaaagagagtaagtgaactgtttcaaagcagagaagtctcaagtatttgggaaacagctgtcagctattttagaggtttaaaattggtaacgtttatgagaagatttttgctagtgagaaaaggagatacagagactttaatgtgattatctgaagtcacagtctttcctgtgtgttcatcttgtctctcagaccagaatgttttctcaactactatgtggtgacagctgtattgtaaagatatccgggatttcttcatttgtctttgccaatatgcaaggtggggtagggtggcaagtaggaccaaacctaaactgaaggtgcaaggtggggctggaaaattgtagctgtgagtgggaactgcttaggcagatagaaatgggggggcacaggggagtgtagtgctccctgtttttgttccatcctgcagactgggtttgccctgtttgctctaaatttaagattagttgagacttcccctccccgccccccccccaaaaatacaagcagtccaaaacagaatatgttcccacccattatttatcgggagaactttagtgtccttttggtcttaaagcatgtgctcagttaccctctctcttccaatagtcaggtgactagttcttcttatctttcttttaacactaactttgtttctggtgaacctgaatctagactgatcccttcatcagattgcagacacctctgtctgggttaacgcagtcttcttagacatcccacaaatacacctgtatttactctatggagagtattaagttaaagaggcttgagcttccttccttttcaagtggctgtcttaataacgacagtccttacatttacctcagtgcacaaattcaaattaatgataaaggcagtattgctttcctacattgtctcaaggggaaggacgaaactcttgataaatgtgttaagtacagggaaggtatttccgtaagaatcttgtgatatcattcttgggcatatttggtctagcactcacaagtcaatgtccttctttagtgtggtacaatggctggggttaaagatggatcagactagtttagaaccacagttattatagtttaaagtggttctcaaacttggttgcatattggaagcacctggggtagcttttgaaaaatatgagctcctatactcccaccaccagagattctgattcaatgataacaactgaccttctggatttgagtcagtaaaagctcttatttgtccatagtagtgactcaatctctagcatactccaaatctcagttccttacttcatttcaggtactgttaaaacctgagctttttaccccatttttgttggtttgcagttattctggaaagatggacatatgattatgtctgtttattgagcattcagttttgtaatgcaacagctatgtaaccagagatgatctttgtcactggagagcaatcaagtacctctgtttaaaaaaaatttttttttcactcttgagcagcttcatgatattcaagtacctctcttaatagcaaaatgccctcataataagttagtccttaattgcacttggtcattcagcaaatatttattcaacacctat

SEQ ID NO: 12 - DNA, 6568 bp, Homo sapiens
  source 1..6568: mol_type = genomic DNA
atatgactgaggcgcccatgggggtggcggggcggctgtaggagcaggggcctagcaagcgcccagcggagcgacccctgcctggccgtggctagcatggcccctacgctgttccagaagctcttcagcaagaggaccgggctgggcgcgcccggccgcgacgcccgggacccagattgcgggttcagttggcctttaccagagtttgatccaagccagattcgactgattgtatatcaagactgtgaaagacgagggagaaatgttttgtttgactccagtgttaagagaagaaatgaggacatatcagtatcgaaactcggcagtgatgctcaagttaaagtctttgggaaatgctgccaactgaaacctggaggagacagttcttcctctttagatagttctgtgacttcatcttctgatataaaagaccagtgtcttaagtaccagggttctcggtgctcttctgatgccaatatgcttggagagatgatgtttggctcagtagcaatgagctacaaaggatccaccttaaaaattcatcagattcgttcccctccacagctcatgctcagcaaagtgtttactgctcggactggcagcagtatttgtgggagtctcaatacgctacaagatagtcttgaattcatcaatcaggacaacaatacattaaaggctgataataacacagttattaatggactgcttggaaatataggtctttcacagttctgcagccccaggcgggcattctctgagcagggtccgctccgcctgatcaggagcgcctctttctttgcagttcacagcaacccaatggacatgcctggaagagagctcaatgaggacagagacagtggcatagcacggtctgcatctctcagcagcttgctgatcactccatttccttccccaaactcctcacttacccgaagttgtgccagcagctaccagcgacgttggcgacgcagccaaacaacaagtttggaaaatggggtatttcctagatggtctatagaagaaagctttaatctctcagatgaaagctgtggccctaacccaggaattgtgcggaaaaagaagattgcaattggggtaatcttttcattgtccaaagatgaagatgaaaataacaaatttaatgaattctttttttcacattttcctctctttgaaagccacatgaacaaattaaagagtgcaatagaacaggctatgaaaatgagccggagatcagctgatgccagtcagagaagtttggcatataatcgaatagttgatgccctaaatgaattcagaacaacaatttgtaatctttacacgatgccacgaattggagaacctgtctggcttacaatgatgtcggggactccagaaaagaaccacctttgctatcgtttcatgaaggagttcacctttctaatggaaaatgcttccaaaaatcaattcttgccagctctcattactgcagttctgaccaatcatcttgcctgggttccaacagtcatgccaaatggacaaccacctataaaaatatttttagaaaagcattcctctcagagtgtggacatgttggcaaagactcatccatataacccactttgggcacaactgggagacttgtatggcgctattggctctcccgtacggttagcaaggactgtggtagttggcaaacgacaagacatggtccagaggctactttattttcttacttattttataagatgctctgaacttcaagaaacgcatcttttagaaaatggagaagatgaagccatcgttatgccaggcacagtaattactaccactttagagaaaggtgaaatagaagaatcagagtatgtccttgtcacaatgcatagaaacaaaagcagtttgctctttaaagagtcagaagaaattagaactcccaattgtaactgtaaatattgcagtcatccactccttgggcaaaatgtagagaacatttcacaacaagagagagaagatattcaaaacagctctaaggagctgctaggaatttcagatgagtgccagatgatttctccttctgactgccaagaagaaaatgctgttgatgttaaacagtacagagataaattaagaacttgctttgacgccaagttagagacagttgtttgcacaggatctgttccagtagacaaatgtgcattgtcagagtcaggcttagagtcaacagaggaaacatggcagagtgagaagttgctggattcagacagtcacacaggcaaagcaatgagatccacaggaatggttgtggaaaaaaaacctccagataagattgtgcctgcttcattttcttgtgaggctgcccagacaaaggttactttcctgattggggattctatgtcacctgattcagatactgagcttcgaagtcaggcagtggtggatcagattaccagacatcacaccaaaccattgaaggaagaaagaggggctattgatcagcatcaagaaactaaacaaacaaccaaggaccaatctggagagtctgatacacagaacatggtttctgaagagccctgtgaacttccctgttggaatcattcagacccagaaagcatgagcttattcgacgaatattttaatgatgattcaatcgaaaccaggactattgatgatgttccatttaaaacaagtacagatagtaaagaccattgctgtatgttagagttttcaaaaatattgtgtacaaaaaataacaagcagaacaatgaattttgtaaatgtatagaaacagttccccaagattcatgtaaaacctgctttcctcagcaggaccaaagagatacactctccattcttgtcccccatggggataaagagagttcagataaaaaaattgctgtaggaactgaatgggacattccaagaaatgaaagttcagacagtgcccttggggatagtgaaagtgaagatacaggtcatgatatgactagacaagttagcagttattatggaggagagcaagaagattgggcagaagaggatgagataccttttcctgggtcaaagttaatcgaagtgagtgctgttcagcccaacattgccaacttcgggaggtccttgctgggtggctactgctcatcttatgtgcctgactttgttcttcaaggaattgggagtgatgagaggttccgtcagtgtctgatgtcagatttatctcatgctgtgcagcatccagttttggatgaaccaatagcagaagctgtctgtattatagctgacatggataaatggactgttcaagtggccagtagccagagacgagtgacagataataaattgggaaaggaagtattggtttccagtcttgtttccaatctgcttcattccacacttcagctttataagcataacttgtctccaaatttttgtgtaatgcatcttgaagaccggttgcaggagctatacttcaaaagtaaaatgctgtctgaatacctgagggggcagatgcgtgttcatgtcaaggagctgggagtggttctggggattgaatccagtgatcttccacttctggctgctgtagcaagcactcactctccatatgttgcacaaatactcctttaatatacctaaaaattgttagaaattggtgggaaaataggtagaaaccaaggaagcagacacaacatgcatttatggagattctttttcccttttagacttccatctgaatgagtcagtcaccagggtattctgcatagcattgtatattctgtgtatgtcagatggctttttctttttgactggacttttgggtggtggtagatttttaaacaaatgaaattaaagcaacaataattttgaagcatttgaaaaagccaaagtgtacggtagaaatttctacaaaatgaatattatcaagagtttcatgtgatcactgcagtgttgtcacagctcataaatagcaacagtgtctcatgatttaatggctcagaaatagttattcattagtttttaatttttaatttctaaggtacagagatctataaaaccttgattatttgttagttttgcaattcaaaacagctaatgtctggttatttctcaaagtaagtattttaaacagcctgttaattataagaaactcagaataatgagtgtaaatgtgttatgttatccacccaagtgtacatatgtacctatttttttttaaaaagcagaaatagaaatacaagactggtaaacatgcctttaaaaatatatatattttcaactagtattgtctataatgctgaaatattacttattggtgatttttctgtttcacacactctaaaatataagtaaagccaaccttttttttaaggctgagattcccaaaatgagaatactactttataccatttgtttataagtatgaactgttcttataaatattaatatttacatattcactaatttaacataaatgaaaattaggattaaaaattgcaccaaagcatcggcaaaaacaatactatattctttaaaagtgctcaggtagccaaggcccttgcttttggtatcaaccctcatgaacccataggagctgaatatttgtttcactgcttaataatcctcaatttacactattcataactcttaaaattattctctttttttctaagagtccctcccttccaaaagtgtatttttttcaaagattttcacttctcaattgttgcctttgtacatactatagagtgttgcttgtaagaaaggctaatatggaaccaaactcttgtaagtaatgtaaatagaaaggtgggtggataaagttttcaatactttctactacctcagtttacttgagtactacattatagtttattctttgcttatctggtctaagagacttttaatgctagtagtaaagttggtttctgctttcattgactattttcatcataatttcatcattgattaaaaaaagaaaaccacttgtttattcagttattaaatatatttactatataacacatccattcttgctgtttaaattttcaatagttaatggaaagttgtctttgaccttgaatttacagcattgggtcacattttgccttgctgtgtatgtattcaagagacttccaactagacaaagaaaaaattgttgttttaatggaatgtaaacctgaaattggtgtgtctgcaatctgtttggcccatgaccttttacctagtcccagttattacctgagtctcccatggatgacttgctgccaaggagtgtttgtggatatattttctttggcttaattttcttattctgtgcattaacaaaattatccagttgtctgattttggaattctatgagtcaatctttttggcagaattcagaatattaaaaagttcatacatttgcgggccattgtacctttttttttttttttttttttttgacggagtttcactcttgttacccaggctggagtgcaatggtgcgatctcagctcactgcaacctccgcctcccagttcaagtgattctcctgcctcagcccccaagtagctgggattacaagtgtgcgccaccacacccagctaattttttatttttagtagagatgagatttcaccatgtgttggtcaggctggtcttgaactcctgaactcaagtgatccacctgcctcgacctcccaaagtactgggattacaggcgtgagccactgtgcccagccttgtacttttttttttttttattgtagctctgtatagcacttggataatgtctgggtgtctccttaaccatcaaactgttctttatttaaaatgtttaattaccgtttagaaattctagtcctcaataagtgggtggctcatgctattgttgttcctaaagctaagctttgctgggaaggaaatgacctatagtttcttaaagaatcattaatccttataggattcctgagttactgttttgttcctccccactgcttcccattcctgagttttgtaattcctaatccttctataatttctattaccttcaccatagtcattctttccttacgcaaagcccaaggaatgagctgctgctactttaaagtgtggtcattatgatgaatgtgaaaagagttttggcttgttctaaataatttttacaagttatggtacagacagttgttacatatcaaaaaaaacctgtttattgaaacaggaaataaaaaagggatcttttacattatagaattaaaactaattttttcttgtatataaactaattggtttgattttaaatatttctggcttttattaatatgtcttaattttgagtttgaaaatgttaagtgcaataaaaacatactagtacagattttgttttgttccaattggcatactctggggatgatcacttaaaaaaacagattttacataatgcctacttctggtagatgtcttatgagattgttctgctttttctaagttacttagatgttggatatgtacatagctgtttcttgttctgtatacatttctcaaatgtacacttgtattataataacctcccagttctaggggatatttgtgcaataaatacacatgtcaacttga

SEQ ID NO: 13 - DNA, 6484 bp, Homo sapiens
  source 1..6484: mol_type = genomic DNA
atatgactgaggcgcccatgggggtggcggggcggctgtaggagcaggggcctagcaagcgcccagcggagcgacccctgcctggccgtggctagcatggcccctacgctgttccagaagctcttcagcaagaggaccgggctgggcgcgcccggccgcgacgcccgggacccagattgcgggttcagttggcctttaccagagtttgatccaagccagattcgactgattgtatatcaagactgtgaaagacgagggagaaatgttttgtttgactccagtgttaagagaagaaatgaggacatatcagtatcgaaactcggcagtgatgctcaagttaaagtctttgggaaatgctgccaactgaaacctggaggagacagttcttcctctttagatagttctgtgacttcatcttctgatataaaagaccagtgtcttaagtaccagggttctcggtgctcttctgatgccaatatgcttggagagatgatgtttggctcagtagcaatgagctacaaaggatccaccttaaaaattcatcagattcgttcccctccacagctcatgctcagcaaagtgtttactgctcggactggcagcagtatttgtgggagtctcaatacgctacaagatagtcttgaattcatcaatcaggacaacaatacattaaaggctgataataacacagttattaatggactgcttggaaatatagttcacagcaacccaatggacatgcctggaagagagctcaatgaggacagagacagtggcatagcacggtctgcatctctcagcagcttgctgatcactccatttccttccccaaactcctcacttacccgaagttgtgccagcagctaccagcgacgttggcgacgcagccaaacaacaagtttggaaaatggggtatttcctagatggtctatagaagaaagctttaatctctcagatgaaagctgtggccctaacccaggaattgtgcggaaaaagaagattgcaattggggtaatcttttcattgtccaaagatgaagatgaaaataacaaatttaatgaattctttttttcacattttcctctctttgaaagccacatgaacaaattaaagagtgcaatagaacaggctatgaaaatgagccggagatcagctgatgccagtcagagaagtttggcatataatcgaatagttgatgccctaaatgaattcagaacaacaatttgtaatctttacacgatgccacgaattggagaacctgtctggcttacaatgatgtcggggactccagaaaagaaccacctttgctatcgtttcatgaaggagttcacctttctaatggaaaatgcttccaaaaatcaattcttgccagctctcattactgcagttctgaccaatcatcttgcctgggttccaacagtcatgccaaatggacaaccacctataaaaatatttttagaaaagcattcctctcagagtgtggacatgttggcaaagactcatccatataacccactttgggcacaactgggagacttgtatggcgctattggctctcccgtacggttagcaaggactgtggtagttggcaaacgacaagacatggtccagaggctactttattttcttacttattttataagatgctctgaacttcaagaaacgcatcttttagaaaatggagaagatgaagccatcgttatgccaggcacagtaattactaccactttagagaaaggtgaaatagaagaatcagagtatgtccttgtcacaatgcatagaaacaaaagcagtttgctctttaaagagtcagaagaaattagaactcccaattgtaactgtaaatattgcagtcatccactccttgggcaaaatgtagagaacatttcacaacaagagagagaagatattcaaaacagctctaaggagctgctaggaatttcagatgagtgccagatgatttctccttctgactgccaagaagaaaatgctgttgatgttaaacagtacagagataaattaagaacttgctttgacgccaagttagagacagttgtttgcacaggatctgttccagtagacaaatgtgcattgtcagagtcaggcttagagtcaacagaggaaacatggcagagtgagaagttgctggattcagacagtcacacaggcaaagcaatgagatccacaggaatggttgtggaaaaaaaacctccagataagattgtgcctgcttcattttcttgtgaggctgcccagacaaaggttactttcctgattggggattctatgtcacctgattcagatactgagcttcgaagtcaggcagtggtggatcagattaccagacatcacaccaaaccattgaaggaagaaagaggggctattgatcagcatcaagaaactaaacaaacaaccaaggaccaatctggagagtctgatacacagaacatggtttctgaagagccctgtgaacttccctgttggaatcattcagacccagaaagcatgagcttattcgacgaatattttaatgatgattcaatcgaaaccaggactattgatgatgttccatttaaaacaagtacagatagtaaagaccattgctgtatgttagagttttcaaaaatattgtgtacaaaaaataacaagcagaacaatgaattttgtaaatgtatagaaacagttccccaagattcatgtaaaacctgctttcctcagcaggaccaaagagatacactctccattcttgtcccccatggggataaagagagttcagataaaaaaattgctgtaggaactgaatgggacattccaagaaatgaaagttcagacagtgcccttggggatagtgaaagtgaagatacaggtcatgatatgactagacaagttagcagttattatggaggagagcaagaagattgggcagaagaggatgagataccttttcctgggtcaaagttaatcgaagtgagtgctgttcagcccaacattgccaacttcgggaggtccttgctgggtggctactgctcatcttatgtgcctgactttgttcttcaaggaattgggagtgatgagaggttccgtcagtgtctgatgtcagatttatctcatgctgtgcagcatccagttttggatgaaccaatagcagaagctgtctgtattatagctgacatggataaatggactgttcaagtggccagtagccagagacgagtgacagataataaattgggaaaggaagtattggtttccagtcttgtttccaatctgcttcattccacacttcagctttataagcataacttgtctccaaatttttgtgtaatgcatcttgaagaccggttgcaggagctatacttcaaaagtaaaatgctgtctgaatacctgagggggcagatgcgtgttcatgtcaaggagctgggagtggttctggggattgaatccagtgatcttccacttctggctgctgtagcaagcactcactctccatatgttgcacaaatactcctttaatatacctaaaaattgttagaaattggtgggaaaataggtagaaaccaaggaagcagacacaacatgcatttatggagattctttttcccttttagacttccatctgaatgagtcagtcaccagggtattctgcatagcattgtatattctgtgtatgtcagatggctttttctttttgactggacttttgggtggtggtagatttttaaacaaatgaaattaaagcaacaataattttgaagcatttgaaaaagccaaagtgtacggtagaaatttctacaaaatgaatattatcaagagtttcatgtgatcactgcagtgttgtcacagctcataaatagcaacagtgtctcatgatttaatggctcagaaatagttattcattagtttttaatttttaatttctaaggtacagagatctataaaaccttgattatttgttagttttgcaattcaaaacagctaatgtctggttatttctcaaagtaagtattttaaacagcctgttaattataagaaactcagaataatgagtgtaaatgtgttatgttatccacccaagtgtacatatgtacctatttttttttaaaaagcagaaatagaaatacaagactggtaaacatgcctttaaaaatatatatattttcaactagtattgtctataatgctgaaatattacttattggtgatttttctgtttcacacactctaaaatataagtaaagccaaccttttttttaaggctgagattcccaaaatgagaatactactttataccatttgtttataagtatgaactgttcttataaatattaatatttacatattcactaatttaacataaatgaaaattaggattaaaaattgcaccaaagcatcggcaaaaacaatactatattctttaaaagtgctcaggtagccaaggcccttgcttttggtatcaaccctcatgaacccataggagctgaatatttgtttcactgcttaataatcctcaatttacactattcataactcttaaaattattctctttttttctaagagtccctcccttccaaaagtgtatttttttcaaagattttcacttctcaattgttgcctttgtacatactatagagtgttgcttgtaagaaaggctaatatggaaccaaactcttgtaagtaatgtaaatagaaaggtgggtggataaagttttcaatactttctactacctcagtttacttgagtactacattatagtttattctttgcttatctggtctaagagacttttaatgctagtagtaaagttggtttctgctttcattgactattttcatcataatttcatcattgattaaaaaaagaaaaccacttgtttattcagttattaaatatatttactatataacacatccattcttgctgtttaaattttcaatagttaatggaaagttgtctttgaccttgaatttacagcattgggtcacattttgccttgctgtgtatgtattcaagagacttccaactagacaaagaaaaaattgttgttttaatggaatgtaaacctgaaattggtgtgtctgcaatctgtttggcccatgaccttttacctagtcccagttattacctgagtctcccatggatgacttgctgccaaggagtgtttgtggatatattttctttggcttaattttcttattctgtgcattaacaaaattatccagttgtctgattttggaattctatgagtcaatctttttggcagaattcagaatattaaaaagttcatacatttgcgggccattgtacctttttttttttttttttttttttgacggagtttcactcttgttacccaggctggagtgcaatggtgcgatctcagctcactgcaacctccgcctcccagttcaagtgattctcctgcctcagcccccaagtagctgggattacaagtgtgcgccaccacacccagctaattttttatttttagtagagatgagatttcaccatgtgttggtcaggctggtcttgaactcctgaactcaagtgatccacctgcctcgacctcccaaagtactgggattacaggcgtgagccactgtgcccagccttgtacttttttttttttttattgtagctctgtatagcacttggataatgtctgggtgtctccttaaccatcaaactgttctttatttaaaatgtttaattaccgtttagaaattctagtcctcaataagtgggtggctcatgctattgttgttcctaaagctaagctttgctgggaaggaaatgacctatagtttcttaaagaatcattaatccttataggattcctgagttactgttttgttcctccccactgcttcccattcctgagttttgtaattcctaatccttctataatttctattaccttcaccatagtcattctttccttacgcaaagcccaaggaatgagctgctgctactttaaagtgtggtcattatgatgaatgtgaaaagagttttggcttgttctaaataatttttacaagttatggtacagacagttgttacatatcaaaaaaaacctgtttattgaaacaggaaataaaaaagggatcttttacattatagaattaaaactaattttttcttgtatataaactaattggtttgattttaaatatttctggcttttattaatatgtcttaattttgagtttgaaaatgttaagtgcaataaaaacatactagtacagattttgttttgttccaattggcatactctggggatgatcacttaaaaaaacagattttacataatgcctacttctggtagatgtcttatgagattgttctgctttttctaagttacttagatgttggatatgtacatagctgtttcttgttctgtatacatttctcaaatgtacacttgtattataataacctcccagttctaggggatatttgtgcaataaatacacatgtcaacttga

SEQ ID NO: 14 - DNA, 1728 bp, Homo sapiens
  source 1..1728: mol_type = genomic DNA
atatgactgaggcgcccatgggggtggcggggcggctgtaggagcaggggcctagcaagcgcccagcggagcgacccctgcctggccgtggctagcatggcccctacgctgttccagaagctcttcagcaagaggaccgggctgggcgcgcccggccgcgacgcccgggacccagattgcgggttcagttggcctttaccagagtttgatccaagccagattcgactgattgtatatcaagactgtgaaagacgagggagaaatgttttgtttgactccagtgttaagagaagaaatgaggacatatcagtatcgaaactcggcagtgatgctcaagttaaagtctttgggaaatgctgccaactgaaacctggaggagacagttcttcctctttagatagttctgtgacttcatcttctgatataaaagaccagtgtcttaagtaccagggttctcggtgctcttctgatgccaatatgcttggagagatgatgtttggctcagtagcaatgagctacaaaggatccaccttaaaaattcatcagattcgttcccctccacagctcatgctcagcaaagtgtttactgctcggactggcagcagtatttgtgggagtctcaatacgctacaagatagtcttgaattcatcaatcaggacaacaatacattaaaggctgataataacacagttattaatggactgcttggaaatataggtctttcacagttctgcagccccaggcgggcattctctgagcagggtccgctccgcctgatcaggagcgcctctttctttgcagttcacagcaacccaatggacatgcctggaagagagctcaatgaggacagagacagtggcatagcacggtctgcatctctcagcagcttgctgatcactccatttccttccccaaactcctcacttacccgaagttgtgccagcagctaccagcgacgttggcgacgcagccaaacaacaagtttggaaaatggggtatttcctagatggtctatagaagaaagctttaatctctcagatgaaagctgtggccctaacccaggaattgtgcggaaaaagaagattgcaattggggtaatcttttcattgtccaaagatgaagatgaaaataacaaatttaatgaattctttttttcacattttcctctctttgaaagccacatgaacaaattaaagagtgcaatagaacaggctatgaaaatgagccggagatcagctgatgccagtcagagaagtttggcatataatcgaatagttgatgccctaaatgaattcagaacaacaatttgtaatctttacacgatgccacgaattggagaacctgtctggcttacaatgatgtcggggactccagaaaagaaccacctttgctatcgtttcatgaaggagttcacctttctaatggaaaatgcttccaaaaatcaattcttgccagctctcattactgcagttctgaccaatcatcttgcctgggttccaacagtcatgccaaatggacaaccacctataaaaatatttttagaaaagcattcctctcagagtgtggacatgttggcaaagactcatccatataacccactttgggcacaactgggtatgtaatctgacaactgttacactatgtattagacttttttgtagctatctgtaattattttatagcaaaaccaaaaataaataaaatgcttttacctcctgcattctaaa

SEQ ID NO: 15 - DNA, 6433 bp, Homo sapiens
  source 1..6433: mol_type = genomic DNA
atatgactgaggcgcccatgggggtggcggggcggctgtaggagcaggggcctagcaagcgcccagcggagcgacccctgcctggccgtggctagcatggcccctacgctgttccagaagctcttcagcaagaggaccgggctgggcgcgcccggccgcgacgcccgggacccagattgcgggttcagttggcctttaccagagtttgatccaagccagattcgactgattgtatatcaagactgtgaaagacgagggagaaatgttttgtttgactccagtgttaagagaagaaatgaggacatatcagtatcgggttctcggtgctcttctgatgccaatatgcttggagagatgatgtttggctcagtagcaatgagctacaaaggatccaccttaaaaattcatcagattcgttcccctccacagctcatgctcagcaaagtgtttactgctcggactggcagcagtatttgtgggagtctcaatacgctacaagatagtcttgaattcatcaatcaggacaacaatacattaaaggctgataataacacagttattaatggactgcttggaaatataggtctttcacagttctgcagccccaggcgggcattctctgagcagggtccgctccgcctgatcaggagcgcctctttctttgcagttcacagcaacccaatggacatgcctggaagagagctcaatgaggacagagacagtggcatagcacggtctgcatctctcagcagcttgctgatcactccatttccttccccaaactcctcacttacccgaagttgtgccagcagctaccagcgacgttggcgacgcagccaaacaacaagtttggaaaatggggtatttcctagatggtctatagaagaaagctttaatctctcagatgaaagctgtggccctaacccaggaattgtgcggaaaaagaagattgcaattggggtaatcttttcattgtccaaagatgaagatgaaaataacaaatttaatgaattctttttttcacattttcctctctttgaaagccacatgaacaaattaaagagtgcaatagaacaggctatgaaaatgagccggagatcagctgatgccagtcagagaagtttggcatataatcgaatagttgatgccctaaatgaattcagaacaacaatttgtaatctttacacgatgccacgaattggagaacctgtctggcttacaatgatgtcggggactccagaaaagaaccacctttgctatcgtttcatgaaggagttcacctttctaatggaaaatgcttccaaaaatcaattcttgccagctctcattactgcagttctgaccaatcatcttgcctgggttccaacagtcatgccaaatggacaaccacctataaaaatatttttagaaaagcattcctctcagagtgtggacatgttggcaaagactcatccatataacccactttgggcacaactgggagacttgtatggcgctattggctctcccgtacggttagcaaggactgtggtagttggcaaacgacaagacatggtccagaggctactttattttcttacttattttataagatgctctgaacttcaagaaacgcatcttttagaaaatggagaagatgaagccatcgttatgccaggcacagtaattactaccactttagagaaaggtgaaatagaagaatcagagtatgtccttgtcacaatgcatagaaacaaaagcagtttgctctttaaagagtcagaagaaattagaactcccaattgtaactgtaaatattgcagtcatccactccttgggcaaaatgtagagaacatttcacaacaagagagagaagatattcaaaacagctctaaggagctgctaggaatttcagatgagtgccagatgatttctccttctgactgccaagaagaaaatgctgttgatgttaaacagtacagagataaattaagaacttgctttgacgccaagttagagacagttgtttgcacaggatctgttccagtagacaaatgtgcattgtcagagtcaggcttagagtcaacagaggaaacatggcagagtgagaagttgctggattcagacagtcacacaggcaaagcaatgagatccacaggaatggttgtggaaaaaaaacctccagataagattgtgcctgcttcattttcttgtgaggctgcccagacaaaggttactttcctgattggggattctatgtcacctgattcagatactgagcttcgaagtcaggcagtggtggatcagattaccagacatcacaccaaaccattgaaggaagaaagaggggctattgatcagcatcaagaaactaaacaaacaaccaaggaccaatctggagagtctgatacacagaacatggtttctgaagagccctgtgaacttccctgttggaatcattcagacccagaaagcatgagcttattcgacgaatattttaatgatgattcaatcgaaaccaggactattgatgatgttccatttaaaacaagtacagatagtaaagaccattgctgtatgttagagttttcaaaaatattgtgtacaaaaaataacaagcagaacaatgaattttgtaaatgtatagaaacagttccccaagattcatgtaaaacctgctttcctcagcaggaccaaagagatacactctccattcttgtcccccatggggataaagagagttcagataaaaaaattgctgtaggaactgaatgggacattccaagaaatgaaagttcagacagtgcccttggggatagtgaaagtgaagatacaggtcatgatatgactagacaagttagcagttattatggaggagagcaagaagattgggcagaagaggatgagataccttttcctgggtcaaagttaatcgaagtgagtgctgttcagcccaacattgccaacttcgggaggtccttgctgggtggctactgctcatcttatgtgcctgactttgttcttcaaggaattgggagtgatgagaggttccgtcagtgtctgatgtcagatttatctcatgctgtgcagcatccagttttggatgaaccaatagcagaagctgtctgtattatagctgacatggataaatggactgttcaagtggccagtagccagagacgagtgacagataataaattgggaaaggaagtattggtttccagtcttgtttccaatctgcttcattccacacttcagctttataagcataacttgtctccaaatttttgtgtaatgcatcttgaagaccggttgcaggagctatacttcaaaagtaaaatgctgtctgaatacctgagggggcagatgcgtgttcatgtcaaggagctgggagtggttctggggattgaatccagtgatcttccacttctggctgctgtagcaagcactcactctccatatgttgcacaaatactcctttaatatacctaaaaattgttagaaattggtgggaaaataggtagaaaccaaggaagcagacacaacatgcatttatggagattctttttcccttttagacttccatctgaatgagtcagtcaccagggtattctgcatagcattgtatattctgtgtatgtcagatggctttttctttttgactggacttttgggtggtggtagatttttaaacaaatgaaattaaagcaacaataattttgaagcatttgaaaaagccaaagtgtacggtagaaatttctacaaaatgaatattatcaagagtttcatgtgatcactgcagtgttgtcacagctcataaatagcaacagtgtctcatgatttaatggctcagaaatagttattcattagtttttaatttttaatttctaaggtacagagatctataaaaccttgattatttgttagttttgcaattcaaaacagctaatgtctggttatttctcaaagtaagtattttaaacagcctgttaattataagaaactcagaataatgagtgtaaatgtgttatgttatccacccaagtgtacatatgtacctatttttttttaaaaagcagaaatagaaatacaagactggtaaacatgcctttaaaaatatatatattttcaactagtattgtctataatgctgaaatattacttattggtgatttttctgtttcacacactctaaaatataagtaaagccaaccttttttttaaggctgagattcccaaaatgagaatactactttataccatttgtttataagtatgaactgttcttataaatattaatatttacatattcactaatttaacataaatgaaaattaggattaaaaattgcaccaaagcatcggcaaaaacaatactatattctttaaaagtgctcaggtagccaaggcccttgcttttggtatcaaccctcatgaacccataggagctgaatatttgtttcactgcttaataatcctcaatttacactattcataactcttaaaattattctctttttttctaagagtccctcccttccaaaagtgtatttttttcaaagattttcacttctcaattgttgcctttgtacatactatagagtgttgcttgtaagaaaggctaatatggaaccaaactcttgtaagtaatgtaaatagaaaggtgggtggataaagttttcaatactttctactacctcagtttacttgagtactacattatagtttattctttgcttatctggtctaagagacttttaatgctagtagtaaagttggtttctgctttcattgactattttcatcataatttcatcattgattaaaaaaagaaaaccacttgtttattcagttattaaatatatttactatataacacatccattcttgctgtttaaattttcaatagttaatggaaagttgtctttgaccttgaatttacagcattgggtcacattttgccttgctgtgtatgtattcaagagacttccaactagacaaagaaaaaattgttgttttaatggaatgtaaacctgaaattggtgtgtctgcaatctgtttggcccatgaccttttacctagtcccagttattacctgagtctcccatggatgacttgctgccaaggagtgtttgtggatatattttctttggcttaattttcttattctgtgcattaacaaaattatccagttgtctgattttggaattctatgagtcaatctttttggcagaattcagaatattaaaaagttcatacatttgcgggccattgtacctttttttttttttttttttttttgacggagtttcactcttgttacccaggctggagtgcaatggtgcgatctcagctcactgcaacctccgcctcccagttcaagtgattctcctgcctcagcccccaagtagctgggattacaagtgtgcgccaccacacccagctaattttttatttttagtagagatgagatttcaccatgtgttggtcaggctggtcttgaactcctgaactcaagtgatccacctgcctcgacctcccaaagtactgggattacaggcgtgagccactgtgcccagccttgtacttttttttttttttattgtagctctgtatagcacttggataatgtctgggtgtctccttaaccatcaaactgttctttatttaaaatgtttaattaccgtttagaaattctagtcctcaataagtgggtggctcatgctattgttgttcctaaagctaagctttgctgggaaggaaatgacctatagtttcttaaagaatcattaatccttataggattcctgagttactgttttgttcctccccactgcttcccattcctgagttttgtaattcctaatccttctataatttctattaccttcaccatagtcattctttccttacgcaaagcccaaggaatgagctgctgctactttaaagtgtggtcattatgatgaatgtgaaaagagttttggcttgttctaaataatttttacaagttatggtacagacagttgttacatatcaaaaaaaacctgtttattgaaacaggaaataaaaaagggatcttttacattatagaattaaaactaattttttcttgtatataaactaattggtttgattttaaatatttctggcttttattaatatgtcttaattttgagtttgaaaatgttaagtgcaataaaaacatactagtacagattttgttttgttccaattggcatactctggggatgatcacttaaaaaaacagattttacataatgcctacttctggtagatgtcttatgagattgttctgctttttctaagttacttagatgttggatatgtacatagctgtttcttgttctgtatacatttctcaaatgtacacttgtattataataacctcccagttctaggggatatttgtgcaataaatacacatgtcaacttga

SEQ ID NO: 16 - DNA, 20 bp, synthetic construct
  misc_feature 1..20: note = Synthetic oligonucleotide
  source 1..20: mol_type = other DNA
cagctatgtacatatccaac

SEQ ID NO: 17 - DNA, 20 bp, synthetic construct
  misc_feature 1..20: note = Synthetic oligonucleotide
  source 1..20: mol_type = other DNA
taagtgatcatccccagagt

SEQ ID NO: 18 - DNA, 20 bp, synthetic construct
  misc_feature 1..20: note = Synthetic oligonucleotide
  source 1..20: mol_type = other DNA
gaccacactttaaagtagca

SEQ ID NO: 19 - DNA, 20 bp, synthetic construct
  misc_feature 1..20: note = Synthetic oligonucleotide
  source 1..20: mol_type = other DNA
ggaagcagtggggaggaaca

SEQ ID NO: 20 - DNA, 20 bp, synthetic construct
  misc_feature 1..20: note = Synthetic oligonucleotide
  source 1..20: mol_type = other DNA
ttgatggttaaggagacacc

SEQ ID NO: 21 - DNA, 20 bp, synthetic construct
  misc_feature 1..20: note = Synthetic oligonucleotide
  source 1..20: mol_type = other DNA
ggcccgcaaatgtatgaact

SEQ ID NO: 22 - DNA, 20 bp, synthetic construct
  misc_feature 1..20: note = Synthetic oligonucleotide
  source 1..20: mol_type = other DNA
actgggactaggtaaaaggt

SEQ ID NO: 23 - DNA, 20 bp, synthetic construct
  misc_feature 1..20: note = Synthetic oligonucleotide
  source 1..20: mol_type = other DNA
gtctcttagaccagataagc

SEQ ID NO: 24 - DNA, 20 bp, synthetic construct
  misc_feature 1..20: note = Synthetic oligonucleotide
  source 1..20: mol_type = other DNA
cttacaagagtttggttcca

SEQ ID NO: 25 - DNA, 20 bp, synthetic construct
  misc_feature 1..20: note = Synthetic oligonucleotide
  source 1..20: mol_type = other DNA
tacacttttggaagggaggg

SEQ ID NO: 26 - DNA, 20 bp, synthetic construct
  misc_feature 1..20: note = Synthetic oligonucleotide
  source 1..20: mol_type = other DNA
ctatgggttcatgagggttg

SEQ ID NO: 27 - DNA, 20 bp, synthetic construct
  misc_feature 1..20: note = Synthetic oligonucleotide
  source 1..20: mol_type = other DNA
aaggttggctttacttatat

SEQ ID NO: 28 - DNA, 20 bp, synthetic construct
  misc_feature 1..20: note = Synthetic oligonucleotide
  source 1..20: mol_type = other DNA
gggtggataacataacacat

SEQ ID NO: 29 - DNA, 20 bp, synthetic construct
  misc_feature 1..20: note = Synthetic oligonucleotide
  source 1..20: mol_type = other DNA
cgtacactttggctttttca

SEQ ID NO: 30 - DNA, 20 bp, synthetic construct
  misc_feature 1..20: note = Synthetic oligonucleotide
  source 1..20: mol_type = other DNA
gcatgttgtgtctgcttcct

SEQ ID NO: 31 - DNA, 20 bp, synthetic construct
  misc_feature 1..20: note = Synthetic oligonucleotide
  source 1..20: mol_type = other DNA
gtgcaacatatggagagtga

SEQ ID NO: 32 - DNA, 20 bp, synthetic construct
  misc_feature 1..20: note = Synthetic oligonucleotide
  source 1..20: mol_type = other DNA
tctgtactgaggacatgaac

SEQ ID NO: 33 - DNA, 20 bp, synthetic construct
  misc_feature 1..20: note = Synthetic oligonucleotide
  source 1..20: mol_type = other DNA
gggaggttgaggctgaagtc

SEQ ID NO: 34 - DNA, 20 bp, synthetic construct
  misc_feature 1..20: note = Synthetic oligonucleotide
  source 1..20: mol_type = other DNA
gtaccaacagcagggcaaca

SEQ ID NO: 35 - DNA, 20 bp, synthetic construct
  misc_feature 1..20: note = Synthetic oligonucleotide
  source 1..20: mol_type = other DNA
agatagtagcctagcaaaga

SEQ ID NO: 36 - DNA, 20 bp, synthetic construct
  misc_feature 1..20: note = Synthetic oligonucleotide
  source 1..20: mol_type = other DNA
ggtttatagtagcaaaaaac

SEQ ID NO: 37 - DNA, 20 bp, synthetic construct
  misc_feature 1..20: note = Synthetic oligonucleotide
  source 1..20: mol_type = other DNA
ggcaagttgtacaaggacac

SEQ ID NO: 38 - DNA, 20 bp, synthetic construct
  misc_feature 1..20: note = Synthetic oligonucleotide
  source 1..20: mol_type = other DNA
ctggaccaacagtgtggtac

SEQ ID NO: 39 - DNA, 20 bp, synthetic construct
  misc_feature 1..20: note = Synthetic oligonucleotide
  source 1..20: mol_type = other DNA
gtggtttgacatacagtagg

SEQ ID NO: 40 - DNA, 20 bp, synthetic construct
  misc_feature 1..20: note = Synthetic oligonucleotide
  source 1..20: mol_type = other DNA
gaaatagggctatattatgc

SEQ ID NO: 41 - DNA, 20 bp, synthetic construct
  misc_feature 1..20: note = Synthetic oligonucleotide
  source 1..20: mol_type = other DNA
gtggaaggcagggcagatac

SEQ ID NO: 42 - DNA, 20 bp, synthetic construct
  misc_feature 1..20: note = Synthetic oligonucleotide
  source 1..20: mol_type = other DNA
gataacagcctccagcttct

SEQ ID NO: 43 - DNA, 20 bp, synthetic construct
  misc_feature 1..20: note = Synthetic oligonucleotide
  source 1..20: mol_type = other DNA
ctcaggtattcagacagcat

SEQ ID NO: 44 - DNA, 20 bp, synthetic construct
  misc_feature 1..20: note = Synthetic oligonucleotide
  source 1..20: mol_type = other DNA
gaggaaccaagaaccaggtc

SEQ ID NO: 45 - DNA, 20 bp, synthetic construct
  misc_feature 1..20: note = Synthetic oligonucleotide
  source 1..20: mol_type = other DNA
catgcgcaccacacccggct

SEQ ID NO: 46 - DNA, 20 bp, synthetic construct
  misc_feature 1..20: note = Synthetic oligonucleotide
  source 1..20: mol_type = other DNA
aacattctgggaggtggagg

SEQ ID NO: 47 - DNA, 20 bp, synthetic construct
  misc_feature 1..20: note = Synthetic oligonucleotide
  source 1..20: mol_type = other DNA
gatgctaaacatgtttgagg

SEQ ID NO: 48 - DNA, 20 bp, synthetic construct
  misc_feature 1..20: note = Synthetic oligonucleotide
  source 1..20: mol_type = other DNA
gctaaacattaaattcatac

SEQ ID NO: 49 - DNA, 20 bp, synthetic construct
  misc_feature 1..20: note = Synthetic oligonucleotide
  source 1..20: mol_type = other DNA
ttctcttcttacccgcagcc

SEQ ID NO: 50 - DNA, 20 bp, synthetic construct
  misc_feature 1..20: note = Synthetic oligonucleotide
  source 1..20: mol_type = other DNA
gcctatttgtggtacctcat

SEQ ID NO: 51 - DNA, 20 bp, synthetic construct
  misc_feature 1..20: note = Synthetic oligonucleotide
  source 1..20: mol_type = other DNA
gggttccaaggtcaccacat

SEQ ID NO: 52 - DNA, 20 bp, synthetic construct
  misc_feature 1..20: note = Synthetic oligonucleotide
  source 1..20: mol_type = other DNA
tcctgttgagttgtaggagt

SEQ ID NO: 53 - DNA, 20 bp, synthetic construct
  misc_feature 1..20: note = Synthetic oligonucleotide
  source 1..20: mol_type = other DNA
agttcatttctgtacgtggc

SEQ ID NO: 54 - DNA, 20 bp, synthetic construct
  misc_feature 1..20: note = Synthetic oligonucleotide
  source 1..20: mol_type = other DNA
ttggtctatatacctgtcct

SEQ ID NO: 55 - DNA, 20 bp, synthetic construct
  misc_feature 1..20: note = Synthetic oligonucleotide
  source 1..20: mol_type = other DNA
tttgagtagtaatgatatcc

SEQ ID NO: 56 - DNA, 20 bp, synthetic construct
  misc_feature 1..20: note = Synthetic oligonucleotide
  source 1..20: mol_type = other DNA
ggtgctattgtaagtggaat

SEQ ID NO: 57 - DNA, 20 bp, synthetic construct
  misc_feature 1..20: note = Synthetic oligonucleotide
  source 1..20: mol_type = other DNA
tctgtgggatctttatgttt

SEQ ID NO: 58 - DNA, 20 bp, synthetic construct
  misc_feature 1..20: note = Synthetic oligonucleotide
  source 1..20: mol_type = other DNA
gggaaagtgggtcttattgt

SEQ ID NO: 59 - DNA, 20 bp, synthetic construct
  misc_feature 1..20: note = Synthetic oligonucleotide
  source 1..20: mol_type = other DNA
gctgggagatgttgcatgac

SEQ ID NO: 60 - DNA, 20 bp, synthetic construct
  misc_feature 1..20: note = Synthetic oligonucleotide
  source 1..20: mol_type = other DNA
ggctggggcaggaggaacac

SEQ ID NO: 61 - DNA, 20 bp, synthetic construct
  misc_feature 1..20: note = Synthetic oligonucleotide
  source 1..20: mol_type = other DNA
cctcccaaagatcctatctc

SEQ ID NO: 62 - DNA, 20 bp, synthetic construct
  misc_feature 1..20: note = Synthetic oligonucleotide
  source 1..20: mol_type = other DNA
gctactggccacttgaacag

SEQ ID NO: 63 - DNA, 20 bp, synthetic construct
  misc_feature 1..20: note = Synthetic oligonucleotide
  source 1..20: mol_type = other DNA
cagacagcttctgctattgg

SEQ ID NO: 64 - DNA, 20 bp, synthetic construct
  misc_feature 1..20: note = Synthetic oligonucleotide
  source 1..20: mol_type = other DNA
gtctactatgtgccaggcaa

SEQ ID NO: 65 - DNA, 20 bp, synthetic construct
  misc_feature 1..20: note = Synthetic oligonucleotide
  source 1..20: mol_type = other DNA
aggttcaagccattcccctg

SEQ ID NO: 66 - DNA, 20 bp, synthetic construct
  misc_feature 1..20: note = Synthetic oligonucleotide
  source 1..20: mol_type = other DNA
tataatgcaggcactttggg

SEQ ID NO: 67 - DNA, 20 bp, synthetic construct
  misc_feature 1..20: note = Synthetic oligonucleotide
  source 1..20: mol_type = other DNA
ataatgcaggcactttggga

SEQ ID NO: 68 - DNA, 20 bp, synthetic construct
  misc_feature 1..20: note = Synthetic oligonucleotide
  source 1..20: mol_type = other DNA
tactactggccaaatggaat

SEQ ID NO: 69 - DNA, 20 bp, synthetic construct
  misc_feature 1..20: note = Synthetic oligonucleotide
  source 1..20: mol_type = other DNA
ttaatgttactacaattagg

SEQ ID NO: 70 - DNA, 20 bp, synthetic construct
  misc_feature 1..20: note = Synthetic oligonucleotide
  source 1..20: mol_type = other DNA
cgcagtgaaagggacatagg

SEQ ID NO: 71 - DNA, 20 bp, synthetic construct
  misc_feature 1..20: note = Synthetic oligonucleotide
  source 1..20: mol_type = other DNA
aagaagagaatggcaaagga

SEQ ID NO: 72 - DNA, 20 bp, synthetic construct
  misc_feature 1..20: note = Synthetic oligonucleotide
  source 1..20: mol_type = other DNA
tacaggtccacttagatgcc

SEQ ID NO: 73 - DNA, 20 bp, synthetic construct
  misc_feature 1..20: note = Synthetic oligonucleotide
  source 1..20: mol_type = other DNA
ggatgcatgccacagtagtg

SEQ ID NO: 74 - DNA, 20 bp, synthetic construct
  misc_feature 1..20: note = Synthetic oligonucleotide
  source 1..20: mol_type = other DNA
ctactggggaggcagaggcg

SEQ ID NO: 75 - DNA, 20 bp, synthetic construct
  misc_feature 1..20: note = Synthetic oligonucleotide
  source 1..20: mol_type = other DNA
gcagttccgctctccaataa

SEQ ID NO: 76 - DNA, 20 bp, synthetic construct
  misc_feature 1..20: note = Synthetic oligonucleotide
  source 1..20: mol_type = other DNA
ggtgtttaaaggttctcatg

SEQ ID NO: 77 - DNA, 20 bp, synthetic construct
  misc_feature 1..20: note = Synthetic oligonucleotide
  source 1..20: mol_type = other DNA
ggaccatagattaagtagct

SEQ ID NO: 78 - DNA, 20 bp, synthetic construct
  misc_feature 1..20: note = Synthetic oligonucleotide
  source 1..20: mol_type = other DNA
atgtgggtacagggttgctg

SEQ ID NO: 79 - DNA, 20 bp, synthetic construct
  misc_feature 1..20: note = Synthetic oligonucleotide
  source 1..20: mol_type = other DNA
aaggaacaggagcaagcacc

SEQ ID NO: 80 - DNA, 20 bp, synthetic construct
  misc_feature 1..20: note = Synthetic oligonucleotide
  source 1..20: mol_type = other DNA
ccatgcctggctcatttgtg

SEQ ID NO: 81 - DNA, 20 bp, synthetic construct
  misc_feature 1..20: note = Synthetic oligonucleotide
  source 1..20: mol_type = other DNA
gtaccttgccagtaagtgac

SEQ ID NO: 82 - DNA, 20 bp, synthetic construct
  misc_feature 1..20: note = Synthetic oligonucleotide
  source 1..20: mol_type = other DNA
tgattgtcagtgctatggaa

SEQ ID NO: 83 - DNA, 20 bp, synthetic construct
  misc_feature 1..20: note = Synthetic oligonucleotide
  source 1..20: mol_type = other DNA
acagacaccataccagagga

SEQ ID NO: 84 - DNA, 20 bp, synthetic construct
  misc_feature 1..20: note = Synthetic oligonucleotide
  source 1..20: mol_type = other DNA
cctggggtatggggccaagc

SEQ ID NO: 85 - DNA, 20 bp, synthetic construct
  misc_feature 1..20: note = Synthetic oligonucleotide
  source 1..20: mol_type = other DNA
ggggtggctttcaggggggc

SEQ ID NO: 86 - DNA, 20 bp, synthetic construct
  misc_feature 1..20: note = Synthetic oligonucleotide
  source 1..20: mol_type = other DNA
gcgatggacgatggagaggc

SEQ ID NO: 87 - DNA, 20 bp, synthetic construct
  misc_feature 1..20: note = Synthetic oligonucleotide
  source 1..20: mol_type = other DNA
ccatgctcaggaaggaaggc

SEQ ID NO: 88 - DNA, 20 bp, synthetic construct
  misc_feature 1..20: note = Synthetic oligonucleotide
  source 1..20: mol_type = other DNA
gctcaggaaggaaggctgga

SEQ ID NO: 89 - DNA, 20 bp, synthetic construct
  misc_feature 1..20: note = Synthetic oligonucleotide
  source 1..20: mol_type = other DNA
gtagctgtgctcggtgagga

SEQ ID NO: 90 - DNA, 20 bp, synthetic construct
  misc_feature 1..20: note = Synthetic oligonucleotide
  source 1..20: mol_type = other DNA
ggattcagggggacctcagt

SEQ ID NO: 91 - DNA, 20 bp, synthetic construct
  misc_feature 1..20: note = Synthetic oligonucleotide
  source 1..20: mol_type = other DNA
agacggcccgggggcatcgt

SEQ ID NO: 92 - DNA, 20 bp, synthetic construct
  misc_feature 1..20: note = Synthetic oligonucleotide
  source 1..20: mol_type = other DNA
ggcaggtgtggatgggcggc

SEQ ID NO: 93 - DNA, 20 bp, synthetic construct
  misc_feature 1..20: note = Synthetic oligonucleotide
  source 1..20: mol_type = other DNA
ccaacaaatcagccgtaagc

SEQ ID NO: 94 - DNA, 20 bp, synthetic construct
  misc_feature 1..20: note = Synthetic oligonucleotide
  source 1..20: mol_type = other DNA
ctctaaactggtctggtggg

SEQ ID NO: 95 - DNA, 20 bp, synthetic construct
  misc_feature 1..20: note = Synthetic oligonucleotide
  source 1..20: mol_type = other DNA
tgctcagggatcttgctttg

SEQ ID NO: 96 - DNA, 20 bp, synthetic construct
  misc_feature 1..20: note = Synthetic oligonucleotide
  source 1..20: mol_type = other DNA
gtacatctagaggggatctc

SEQ ID NO: 97 - DNA, 20 bp, synthetic construct
  misc_feature 1..20: note = Synthetic oligonucleotide
  source 1..20: mol_type = other DNA
gctgagcaaagtgactagtg

SEQ ID NO: 98 - DNA, 20 bp, synthetic construct
  misc_feature 1..20: note = Synthetic oligonucleotide
  source 1..20: mol_type = other DNA
taatttgatggtctctcgcc

SEQ ID NO: 99 - DNA, 20 bp, synthetic construct
  misc_feature 1..20: note = Synthetic oligonucleotide
  source 1..20: mol_type = other DNA
tgaggctgtagtgattctgg

SEQ ID NO: 100 - DNA, 20 bp, synthetic construct
  misc_feature 1..20: note = Synthetic oligonucleotide
  source 1..20: mol_type = other DNA
tccgaaagggctgggagtct

SEQ ID NO: 101 - DNA, 20 bp, synthetic construct
  misc_feature 1..20: note = Synthetic oligonucleotide
  source 1..20: mol_type = other DNA
ggtgggtggcttgggttcaa

SEQ ID NO: 102 - DNA, 20 bp, synthetic construct
  misc_feature 1..20: note = Synthetic oligonucleotide
  source 1..20: mol_type = other DNA
tcccttccatgcacagcttc

SEQ ID NO: 103 - DNA, 20 bp, synthetic construct
  misc_feature 1..20: note = Synthetic oligonucleotide
  source 1..20: mol_type = other DNA
ggctggcctggggatattct

SEQ ID NO: 104 - DNA, 20 bp, synthetic construct
  misc_feature 1..20: note = Synthetic oligonucleotide
  source 1..20: mol_type = other DNA
gaaagctccagccttccctt

SEQ ID NO: 105 - DNA, 20 bp, synthetic construct
  misc_feature 1..20: note = Synthetic oligonucleotide
  source 1..20: mol_type = other DNA
gctggatgctttaaggtgat

SEQ ID NO: 106 - DNA, 20 bp, synthetic construct
  misc_feature 1..20: note = Synthetic oligonucleotide
  source 1..20: mol_type = other DNA
gctgggaaaagtcatgggtt

SEQ ID NO: 107 - DNA, 20 bp, synthetic construct
  misc_feature 1..20: note = Synthetic oligonucleotide
  source 1..20: mol_type = other DNA
gaatgtggttttgatgggag

SEQ ID NO: 108 - DNA, 20 bp, synthetic construct
  misc_feature 1..20: note = Synthetic oligonucleotide
  source 1..20: mol_type = other DNA
gatgggaggctataagaagg

SEQ ID NO: 109 - DNA, 20 bp, synthetic construct
  misc_feature 1..20: note = Synthetic oligonucleotide
  source 1..20: mol_type = other DNA
gtagagggtttgtgaagggt

SEQ ID NO: 110 - DNA, 20 bp, synthetic construct
  misc_feature 1..20: note = Synthetic oligonucleotide
  source 1..20: mol_type = other DNA
gaacaagatttttgggaggc

SEQ ID NO: 111 - DNA, 20 bp, synthetic construct
  misc_feature 1..20: note = Synthetic oligonucleotide
  source 1..20: mol_type = other DNA
tgggcaagctgagatgggag

SEQ ID NO: 112 - DNA, 20 bp, synthetic construct
  misc_feature 1..20: note = Synthetic oligonucleotide
  source 1..20: mol_type = other DNA
cacactatgttagtatgggg

SEQ ID NO: 113 - DNA, 20 bp, synthetic construct
  misc_feature 1..20: note = Synthetic oligonucleotide
  source 1..20: mol_type = other DNA
taatcataacaagaagatgc

SEQ ID NO: 114 - DNA, 20 bp, synthetic construct
  misc_feature 1..20: note = Synthetic oligonucleotide
  source 1..20: mol_type = other DNA
cctagagtaagtattctgtc

SEQ ID NO: 115 - DNA, 20 bp, synthetic construct
  misc_feature 1..20: note = Synthetic oligonucleotide
  source 1..20: mol_type = other DNA
atgcctggaggaagtttctg

SEQ ID NO: 116 - DNA, 20 bp, synthetic construct
  misc_feature 1..20: note = Synthetic oligonucleotide
  source 1..20: mol_type = other DNA
ggctttcttcacatttcaac

SEQ ID NO: 117 - DNA, 20 bp, synthetic construct
  misc_feature 1..20: note = Synthetic oligonucleotide
  source 1..20: mol_type = other DNA
gcctggagtgcaatggtgaa

SEQ ID NO: 118 - DNA, 20 bp, synthetic construct
  misc_feature 1..20: note = Synthetic oligonucleotide
  source 1..20: mol_type = other DNA
gagaaggaaagactagaaac

SEQ ID NO: 119 - DNA, 20 bp, synthetic construct
  misc_feature 1..20: note = Synthetic oligonucleotide
  source 1..20: mol_type = other DNA
ctctgagccatatctgaaac

SEQ ID NO: 120 - DNA, 20 bp, synthetic construct
  misc_feature 1..20: note = Synthetic oligonucleotide
  source 1..20: mol_type = other DNA
tcagcaggagacagcaatgt

SEQ ID NO: 121 - DNA, 20 bp, synthetic construct
  misc_feature 1..20: note = Synthetic oligonucleotide
  source 1..20: mol_type = other DNA
ggccttattttctctgttgc

SEQ ID NO: 122 - DNA, 20 bp, synthetic construct
  misc_feature 1..20: note = Synthetic oligonucleotide
  source 1..20: mol_type = other DNA
cccttggagtactggcacta

SEQ ID NO: 123 - DNA, 20 bp, synthetic construct
  misc_feature 1..20: note = Synthetic oligonucleotide
  source 1..20: mol_type = other DNA
ttaggtaactttctacagac

SEQ ID NO: 124 - DNA, 20 bp, synthetic construct
  misc_feature 1..20: note = Synthetic oligonucleotide
  source 1..20: mol_type = other DNA
tggttgtcttgctctgttgc

SEQ ID NO: 125 - DNA, 20 bp, synthetic construct
  misc_feature 1..20: note = Synthetic oligonucleotide
  source 1..20: mol_type = other DNA
gaaaatcagcacggacataa

SEQ ID NO: 126 - DNA, 20 bp, synthetic construct
  misc_feature 1..20: note = Synthetic oligonucleotide
  source 1..20: mol_type = other DNA
gaggtgaacaaagtaggttc

SEQ ID NO: 127 - DNA, 20 bp, synthetic construct
  misc_feature 1..20: note = Synthetic oligonucleotide
  source 1..20: mol_type = other DNA
ggtttgggggctgaaaagtc

SEQ ID NO: 128 - DNA, 20 bp, synthetic construct
  misc_feature 1..20: note = Synthetic oligonucleotide
  source 1..20: mol_type = other DNA
gcaggacaatttggcccact

SEQ ID NO: 129 - DNA, 20 bp, synthetic construct
  misc_feature 1..20: note = Synthetic oligonucleotide
  source 1..20: mol_type = other DNA
ggatgcagatggtttcacta

SEQ ID NO: 130 - DNA, 20 bp, synthetic construct
  misc_feature 1..20: note = Synthetic oligonucleotide
  source 1..20: mol_type = other DNA
cctgatatcagagctagaca

SEQ ID NO: 131 - DNA, 20 bp, synthetic construct
  misc_feature 1..20: note = Synthetic oligonucleotide
  source 1..20: mol_type = other DNA
actcattcatgattaaggga

SEQ ID NO: 132 - DNA, 20 bp, synthetic construct
  misc_feature 1..20: note = Synthetic oligonucleotide
  source 1..20: mol_type = other DNA
ggcaacgatgtccatggtca

SEQ ID NO: 133 - DNA, 20 bp, synthetic construct
  misc_feature 1..20: note = Synthetic oligonucleotide
  source 1..20: mol_type = other DNA
ggggcagcggggacaaaagg

SEQ ID NO: 134 - DNA, 20 bp, synthetic construct
  misc_feature 1..20: note = Synthetic oligonucleotide
  source 1..20: mol_type = other DNA
ccccacttctatatgtaagc

SEQ ID NO: 135 - DNA, 20 bp, synthetic construct
  misc_feature 1..20: note = Synthetic oligonucleotide
  source 1..20: mol_type = other DNA
gatacaaagatacgggcact

SEQ ID NO: 136 - DNA, 20 bp, synthetic construct
  misc_feature 1..20: note = Synthetic oligonucleotide
  source 1..20: mol_type = other DNA
ggaacctctcatcactccca

SEQ ID NO: 137 - DNA, 20 bp, synthetic construct
  misc_feature 1..20: note = Synthetic oligonucleotide
  source 1..20: mol_type = other DNA
ggcaatgttgggctgaacag

SEQ ID NO: 138 - DNA, 20 bp, synthetic construct
  misc_feature 1..20: note = Synthetic oligonucleotide
  source 1..20: mol_type = other DNA
tcaagagtaaaatcatcgtt

SEQ ID NO: 139 - DNA, 20 bp, synthetic construct
  misc_feature 1..20: note = Synthetic oligonucleotide
  source 1..20: mol_type = other DNA
tttcctcttagtcttggcca

SEQ ID NO: 140 - DNA, 20 bp, synthetic construct
  misc_feature 1..20: note = Synthetic oligonucleotide
  source 1..20: mol_type = other DNA
tgaaaacaagagagctatcc

SEQ ID NO: 141 - DNA, 20 bp, synthetic construct
  misc_feature 1..20: note = Synthetic oligonucleotide
  source 1..20: mol_type = other DNA
acctgtatcttcactttcac

SEQ ID NO: 142 - DNA, 20 bp, synthetic construct
  misc_feature 1..20: note = Synthetic oligonucleotide
  source 1..20: mol_type = other DNA
tcttggaatgtcccattcag

SEQ ID NO: 143 - DNA, 20 bp, synthetic construct
  misc_feature 1..20: note = Synthetic oligonucleotide
  source 1..20: mol_type = other DNA
gctcatgctttctgggtctg

SEQ ID NO: 144 - DNA, 20 bp, synthetic construct
  misc_feature 1..20: note = Synthetic oligonucleotide
  source 1..20: mol_type = other DNA
gatcaatagcccctctttct

SEQ ID NO: 145 - DNA, 20 bp, synthetic construct
  misc_feature 1..20: note = Synthetic oligonucleotide
  source 1..20: mol_type = other DNA
cactctgccatgtttcctct

SEQ ID NO: 146 - DNA, 20 bp, synthetic construct
  misc_feature 1..20: note = Synthetic oligonucleotide
  source 1..20: mol_type = other DNA
gcctgactctgacaatgcac

SEQ ID NO: 147 - DNA, 20 bp, synthetic construct
  misc_feature 1..20: note = Synthetic oligonucleotide
  source 1..20: mol_type = other DNA
gtgacaaggacatactctga

SEQ ID NO: 148 - DNA, 20 bp, synthetic construct
  misc_feature 1..20: note = Synthetic oligonucleotide
  source 1..20: mol_type = other DNA
acgggagagccaatagcgcc

SEQ ID NO: 149 - DNA, 20 bp, synthetic construct
  misc_feature 1..20: note = Synthetic oligonucleotide
  source 1..20: mol_type = other DNA
cactgtaatcctggctggag

SEQ ID NO: 150 - DNA, 20 bp, synthetic construct
  misc_feature 1..20: note = Synthetic oligonucleotide
  source 1..20: mol_type = other DNA
gggttttctggtttcctctt

SEQ ID NO: 151 - DNA, 20 bp, synthetic construct
  misc_feature 1..20: note = Synthetic oligonucleotide
  source 1..20: mol_type = other DNA
ggagaggaaaggagtagtgg

SEQ ID NO: 152 - DNA, 20 bp, synthetic construct
  misc_feature 1..20: note = Synthetic oligonucleotide
  source 1..20: mol_type = other DNA
cctctagccagcaccccacc

SEQ ID NO: 153 - DNA, 20 bp, synthetic construct
  misc_feature 1..20: note = Synthetic oligonucleotide
  source 1..20: mol_type = other DNA
tggggaggtggaagcaggct

SEQ ID NO: 154 - DNA, 20 bp, synthetic construct
  misc_feature 1..20: note = Synthetic oligonucleotide
  source 1..20: mol_type = other DNA
tctcttctggctaacacact

SEQ ID NO: 155 - DNA, 20 bp, synthetic construct
  misc_feature 1..20: note = Synthetic oligonucleotide
  source 1..20: mol_type = other DNA
gatgtcctgtccctttcctc

SEQ ID NO: 156 - DNA, 20 bp, synthetic construct
  misc_feature 1..20: note = Synthetic oligonucleotide
  source 1..20: mol_type = other DNA
gaaagtaggccagtggctgc

SEQ ID NO: 157 - DNA, 20 bp, synthetic construct
  misc_feature 1..20: note = Synthetic oligonucleotide
  source 1..20: mol_type = other DNA
gggatggtggaagaggaaca

SEQ ID NO: 158 - DNA, 20 bp, synthetic construct
  misc_feature 1..20: note = Synthetic oligonucleotide
  source 1..20: mol_type = other DNA
gttacgcgcctgtagtccca

SEQ ID NO: 159 - DNA, 20 bp, synthetic construct
  misc_feature 1..20: note = Synthetic oligonucleotide
  source 1..20: mol_type = other DNA
gcaccctggtacaatccctc

SEQ ID NO: 160 - DNA, 20 bp, synthetic construct
  misc_feature 1..20: note = Synthetic oligonucleotide
  source 1..20: mol_type = other DNA
ggcagacatgaaaggacaag

SEQ ID NO: 161 - DNA, 20 bp, synthetic construct
  misc_feature 1..20: note = Synthetic oligonucleotide
  source 1..20: mol_type = other DNA
agaatgcaggaggtaaaagc

SEQ ID NO: 162 - DNA, 20 bp, synthetic construct
  misc_feature 1..20: note = Synthetic oligonucleotide
  source 1..20: mol_type = other DNA
ggagaagagagaggaaagga

SEQ ID NO: 163 - DNA, 20 bp, synthetic construct
  misc_feature 1..20: note = Synthetic oligonucleotide
  source 1..20: mol_type = other DNA
agagaggaaaggatgagtat

SEQ ID NO: 164 - DNA, 20 bp, synthetic construct
  misc_feature 1..20: note = Synthetic oligonucleotide
  source 1..20: mol_type = other DNA
cagcaggtccttacatttcc

SEQ ID NO: 165 - DNA, 20 bp, synthetic construct
  misc_feature 1..20: note = Synthetic oligonucleotide
  source 1..20: mol_type = other DNA
ccatcacgcctggccatcct

SEQ ID NO: 166 - DNA, 20 bp, synthetic construct
  misc_feature 1..20: note = Synthetic oligonucleotide
  source 1..20: mol_type = other DNA
tcacaaaaaaatgggcagcc

SEQ ID NO: 167 - DNA, 20 bp, synthetic construct
  misc_feature 1..20: note = Synthetic oligonucleotide
  source 1..20: mol_type = other DNA
tttctggagtccccgacatc

SEQ ID NO: 168 - DNA, 20 bp, synthetic construct
  misc_feature 1..20: note = Synthetic oligonucleotide
  source 1..20: mol_type = other DNA
gccagcttggtccttacatc

SEQ ID NO: 169 - DNA, 20 bp, synthetic construct
  misc_feature 1..20: note = Synthetic oligonucleotide
  source 1..20: mol_type = other DNA
gctctccccaccagtgactg

SEQ ID NO: 170 - DNA, 20 bp, synthetic construct
  misc_feature 1..20: note = Synthetic oligonucleotide
  source 1..20: mol_type = other DNA
agcccattccagctccacat

SEQ ID NO: 171 - DNA, 20 bp, synthetic construct
  misc_feature 1..20: note = Synthetic oligonucleotide
  source 1..20: mol_type = other DNA
cttaaggacagcgagaacag

SEQ ID NO: 172 - DNA, 20 bp, synthetic construct
  misc_feature 1..20: note = Synthetic oligonucleotide
  source 1..20: mol_type = other DNA
gctagtcctgtgacttgtac

SEQ ID NO: 173 - DNA, 20 bp, synthetic construct
  misc_feature 1..20: note = Synthetic oligonucleotide
  source 1..20: mol_type = other DNA
ggaaacctgcactgtctgaa

SEQ ID NO: 174 - DNA, 20 bp, synthetic construct
  misc_feature 1..20: note = Synthetic oligonucleotide
  source 1..20: mol_type = other DNA
gtggctgacggctgagattt

SEQ ID NO: 175 - DNA, 20 bp, synthetic construct
  misc_feature 1..20: note = Synthetic oligonucleotide
  source 1..20: mol_type = other DNA
gtaacacctaggagccaaaa

SEQ ID NO: 176 - DNA, 20 bp, synthetic construct
  misc_feature 1..20: note = Synthetic oligonucleotide
  source 1..20: mol_type = other DNA
caggtgtccagatacgatgg

SEQ ID NO: 177 - DNA, 20 bp, synthetic construct
  misc_feature 1..20: note = Synthetic oligonucleotide
  source 1..20: mol_type = other DNA
gaagaaccagctgggtgtgg

SEQ ID NO: 178 - DNA, 20 bp, synthetic construct
  misc_feature 1..20: note = Synthetic oligonucleotide
  source 1..20: mol_type = other DNA
ggtcatagtatcacagaggg

SEQ ID NO: 179 - DNA, 20 bp, synthetic construct
  misc_feature 1..20: note = Synthetic oligonucleotide
  source 1..20: mol_type = other DNA
gcagttgaatggccccgagg

SEQ ID NO: 180 - DNA, 20 bp, synthetic construct
  misc_feature 1..20: note = Synthetic oligonucleotide
  source 1..20: mol_type = other DNA
catgggattgtggggggcgg

SEQ ID NO: 181 - DNA, 20 bp, synthetic construct
  misc_feature 1..20: note = Synthetic oligonucleotide
  source 1..20: mol_type = other DNA
gagaaagcctccaagcagag

SEQ ID NO: 182 - DNA, 20 bp, synthetic construct
  misc_feature 1..20: note = Synthetic oligonucleotide
  source 1..20: mol_type = other DNA
gactccagaggaaaacagaa

SEQ ID NO: 183 - DNA, 20 bp, synthetic construct
  misc_feature 1..20: note = Synthetic oligonucleotide
  source 1..20: mol_type = other DNA
ggattccagagagaaaacag

SEQ ID NO: 184 - DNA, 20 bp, synthetic construct
  misc_feature 1..20: note = Synthetic oligonucleotide
  source 1..20: mol_type = other DNA
taccagagccgaagaacatg

SEQ ID NO: 185 - DNA, 20 bp, synthetic construct
  misc_feature 1..20: note = Synthetic oligonucleotide
  source 1..20: mol_type = other DNA
gtgtctgggaagaatggggt

SEQ ID NO: 186 - DNA, 20 bp, synthetic construct
  misc_feature 1..20: note = Synthetic oligonucleotide
  source 1..20: mol_type = other DNA
gtcattgcacagagccagat

SEQ ID NO: 187 - DNA, 20 bp, synthetic construct
  misc_feature 1..20: note = Synthetic oligonucleotide
  source 1..20: mol_type = other DNA
ggcctcagagtgttatcaag

SEQ ID NO: 188 - DNA, 20 bp, synthetic construct
  misc_feature 1..20: note = Synthetic oligonucleotide
  source 1..20: mol_type = other DNA
catggcaaaatcccgtctac

SEQ ID NO: 189 - DNA, 20 bp, synthetic construct
  misc_feature 1..20: note = Synthetic oligonucleotide
  source 1..20: mol_type = other DNA
gcccggacaatgaaagactc

SEQ ID NO: 190 - DNA, 20 bp, synthetic construct
  misc_feature 1..20: note = Synthetic oligonucleotide
  source 1..20: mol_type = other DNA
tccttcctcttctcaactgc

SEQ ID NO: 191 - DNA, 20 bp, synthetic construct
  misc_feature 1..20: note = Synthetic oligonucleotide
  source 1..20: mol_type = other DNA
tgatccgaggttggctgatt

SEQ ID NO: 192 - DNA, 20 bp, synthetic construct
  misc_feature 1..20: note = Synthetic oligonucleotide
  source 1..20: mol_type = other DNA
tgtgcctctctgtttaagga

SEQ ID NO: 193 - DNA, 20 bp, synthetic construct
  misc_feature 1..20: note = Synthetic oligonucleotide
  source 1..20: mol_type = other DNA
ggaagccatttttaacagca

SEQ ID NO: 194 - DNA, 20 bp, synthetic construct
  misc_feature 1..20: note = Synthetic oligonucleotide
  source 1..20: mol_type = other DNA
taggaacatatgcgtcaggc

SEQ ID NO: 195 - DNA, 20 bp, synthetic construct
  misc_feature 1..20: note = Synthetic oligonucleotide
  source 1..20: mol_type = other DNA
ggggttacaaataaatgtta

SEQ ID NO: 196 - DNA, 20 bp, synthetic construct
  misc_feature 1..20: note = Synthetic oligonucleotide
  source 1..20: mol_type = other DNA
gcatgctgtaaattccaggc

SEQ ID NO: 197 - DNA, 20 bp, synthetic construct
  misc_feature 1..20: note = Synthetic oligonucleotide
  source 1..20: mol_type = other DNA
tggtgacttcagctggatct

SEQ ID NO: 198 - DNA, 20 bp, synthetic construct
  misc_feature 1..20: note = Synthetic oligonucleotide
  source 1..20: mol_type = other DNA
ttcctcagagcccaagcaga

SEQ ID NO: 199 - DNA, 20 bp, synthetic construct
  misc_feature 1..20: note = Synthetic oligonucleotide
  source 1..20: mol_type = other DNA
gtctggatttcgataaaacg

SEQ ID NO: 200 - DNA, 20 bp, synthetic construct
  misc_feature 1..20: note = Synthetic oligonucleotide
  source 1..20: mol_type = other DNA
ccagtgagctatcctctgcc

SEQ ID NO: 201 - DNA, 20 bp, synthetic construct
  misc_feature 1..20: note = Synthetic oligonucleotide
  source 1..20: mol_type = other DNA
gagccactgcacctcgctcc

SEQ ID NO: 202 - DNA, 20 bp, synthetic construct
  misc_feature 1..20: note = Synthetic oligonucleotide
  source 1..20: mol_type = other DNA
gctgactctgacatccctgc

SEQ ID NO: 203 - DNA, 20 bp, synthetic construct
  misc_feature 1..20: note = Synthetic oligonucleotide
  source 1..20: mol_type = other DNA
cctgccaagcttcagcctcc

SEQ ID NO: 204 - DNA, 20 bp, synthetic construct
  misc_feature 1..20: note = Synthetic oligonucleotide
  source 1..20: mol_type = other DNA
atggggtacaatgtgtaata

SEQ ID NO: 205 - DNA, 20 bp, synthetic construct
  misc_feature 1..20: note = Synthetic oligonucleotide
  source 1..20: mol_type = other DNA
gcaatcctctcaccgtggcc

SEQ ID NO: 206 - DNA, 20 bp, synthetic construct
  misc_feature 1..20: note = Synthetic oligonucleotide
  source 1..20: mol_type = other DNA
gacagcagtatctgaatggt

SEQ ID NO: 207 - DNA, 20 bp, synthetic construct
  misc_feature 1..20: note = Synthetic oligonucleotide
  source 1..20: mol_type = other DNA
aatgatccacctaccttggc

SEQ ID NO: 208 - DNA, 20 bp, synthetic construct
  misc_feature 1..20: note = Synthetic oligonucleotide
  source 1..20: mol_type = other DNA
ccaaactgcggacagaggga

SEQ ID NO: 209 - DNA, 20 bp, synthetic construct
  misc_feature 1..20: note = Synthetic oligonucleotide
  source 1..20: mol_type = other DNA
gacaaaaactcctagggacc

SEQ ID NO: 210 - DNA, 20 bp, synthetic construct
  misc_feature 1..20: note = Synthetic oligonucleotide
  source 1..20: mol_type = other DNA
ccttcctcgctggcctctgg

SEQ ID NO: 211 - DNA, 20 bp, synthetic construct
  misc_feature 1..20: note = Synthetic oligonucleotide
  source 1..20: mol_type = other DNA
ccatatcaacatagctccag

SEQ ID NO: 212 - DNA, 20 bp, synthetic construct
  misc_feature 1..20: note = Synthetic oligonucleotide
  source 1..20: mol_type = other DNA
gggaaagtgaggcttctggc

SEQ ID NO: 213 - DNA, 20 bp, synthetic construct
  misc_feature 1..20: note = Synthetic oligonucleotide
  source 1..20: mol_type = other DNA
taatgcaacagcgagatgga

SEQ ID NO: 214 - DNA, 20 bp, synthetic construct
  misc_feature 1..20: note = Synthetic oligonucleotide
  source 1..20: mol_type = other DNA
ggagcaggaatgaagaatgc

SEQ ID NO: 215 - DNA, 20 bp, synthetic construct
  misc_feature 1..20: note = Synthetic oligonucleotide
  source 1..20: mol_type = other DNA
accatagacgcaggaggctc

SEQ ID NO: 216 - DNA, 20 bp, synthetic construct
  misc_feature 1..20: note = Synthetic oligonucleotide
  source 1..20: mol_type = other DNA
caaccttacctatagaagag

SEQ ID NO: 217 - DNA, 20 bp, synthetic construct
  misc_feature 1..20: note = Synthetic oligonucleotide
  source 1..20: mol_type = other DNA
gagactggagaaaaatggtt

SEQ ID NO: 218 - DNA, 20 bp, synthetic construct
  misc_feature 1..20: note = Synthetic oligonucleotide
  source 1..20: mol_type = other DNA
taagggatgtgatgtgaggg

SEQ ID NO: 219 - DNA, 20 bp, synthetic construct
  misc_feature 1..20: note = Synthetic oligonucleotide
  source 1..20: mol_type = other DNA
gaagtatgtgcactccctgt

SEQ ID NO: 220 - DNA, 20 bp, synthetic construct
  misc_feature 1..20: note = Synthetic oligonucleotide
  source 1..20: mol_type = other DNA
gaggagagaaaaatggaagc

SEQ ID NO: 221 - DNA, 20 bp, synthetic construct
  misc_feature 1..20: note = Synthetic oligonucleotide
  source 1..20: mol_type = other DNA
ggtatagaagccgggtgcag

SEQ ID NO: 222 - DNA, 20 bp, synthetic construct
  misc_feature 1..20: note = Synthetic oligonucleotide
  source 1..20: mol_type = other DNA
atagaagccgggtgcagtgg

SEQ ID NO: 223 - DNA, 20 bp, synthetic construct
  misc_feature 1..20: note = Synthetic oligonucleotide
  source 1..20: mol_type = other DNA
agcagaggtcagaacagtga

SEQ ID NO: 224 - DNA, 20 bp, synthetic construct
  misc_feature 1..20: note = Synthetic oligonucleotide
  source 1..20: mol_type = other DNA
aggcggaaaattagtaagga

SEQ ID NO: 225 - DNA, 20 bp, synthetic construct
  misc_feature 1..20: note = Synthetic oligonucleotide
  source 1..20: mol_type = other DNA
ccatgctgacagggaacatt

SEQ ID NO: 226 - DNA, 20 bp, synthetic construct
  misc_feature 1..20: note = Synthetic oligonucleotide
  source 1..20: mol_type = other DNA
ggtcaaagaagacatcttga

SEQ ID NO: 227 - DNA, 20 bp, synthetic construct
  misc_feature 1..20: note = Synthetic oligonucleotide
  source 1..20: mol_type = other DNA
tagtaaaatctagagcagaa

SEQ ID NO: 228 - DNA, 20 bp, synthetic construct
  misc_feature 1..20: note = Synthetic oligonucleotide
  source 1..20: mol_type = other DNA
agaaacaaaagaggggtatc

SEQ ID NO: 229 - DNA, 20 bp, synthetic construct
  misc_feature 1..20: note = Synthetic oligonucleotide
  source 1..20: mol_type = other DNA
ttatctactcctggcaaaca

SEQ ID NO: 230 - DNA, 20 bp, synthetic construct
  misc_feature 1..20: note = Synthetic oligonucleotide
  source 1..20: mol_type = other DNA
gggagcaaggtcaagatgtg

SEQ ID NO: 231 - DNA, 20 bp, synthetic construct
  misc_feature 1..20: note = Synthetic oligonucleotide
  source 1..20: mol_type = other DNA
ctccccctgacccccccaaa

SEQ ID NO: 232 - DNA, 20 bp, synthetic construct
  misc_feature 1..20: note = Synthetic oligonucleotide
  source 1..20: mol_type = other DNA
gagaatctcagcaagttatt

SEQ ID NO: 233 - DNA, 20 bp, synthetic construct
  misc_feature 1..20: note = Synthetic oligonucleotide
  source 1..20: mol_type = other DNA
gatagcatggggattgggag

SEQ ID NO: 234 - DNA, 20 bp, synthetic construct
  misc_feature 1..20: note = Synthetic oligonucleotide
  source 1..20: mol_type = other DNA
tactggaatattgctaagag

SEQ ID NO: 235 - DNA, 20 bp, synthetic construct
  misc_feature 1..20: note = Synthetic oligonucleotide
  source 1..20: mol_type = other DNA
gaacagaacagggagccccc

SEQ ID NO: 236 - DNA, 20 bp, synthetic construct
  misc_feature 1..20: note = Synthetic oligonucleotide
  source 1..20: mol_type = other DNA
ggtgctgcaacgactggaca

SEQ ID NO: 237 - DNA, 20 bp, synthetic construct
  misc_feature 1..20: note = Synthetic oligonucleotide
  source 1..20: mol_type = other DNA
ggctaaaattgacaaactga

SEQ ID NO: 238 - DNA, 20 bp, synthetic construct
  misc_feature 1..20: note = Synthetic oligonucleotide
  source 1..20: mol_type = other DNA
taattgctggtgggaatgca

SEQ ID NO: 239 - DNA, 20 bp, synthetic construct
  misc_feature 1..20: note = Synthetic oligonucleotide
  source 1..20: mol_type = other DNA
tcaagcatacaacattctgg

SEQ ID NO: 240 - DNA, 20 bp, synthetic construct
  misc_feature 1..20: note = Synthetic oligonucleotide
  source 1..20: mol_type = other DNA
acaggggatttttagggcgg

SEQ ID NO: 241 - DNA, 20 bp, synthetic construct
  misc_feature 1..20: note = Synthetic oligonucleotide
  source 1..20: mol_type = other DNA
gggaaaactgtaggttgggg

SEQ ID NO: 242 - DNA, 20 bp, synthetic construct
  misc_feature 1..20: note = Synthetic oligonucleotide
  source 1..20: mol_type = other DNA
gtcccccactcccactctca

SEQ ID NO: 243 - DNA, 20 bp, synthetic construct
  misc_feature 1..20: note = Synthetic oligonucleotide
  source 1..20: mol_type = other DNA
tcaccaactcctaaaaccga

SEQ ID NO: 244 - DNA, 20 bp, synthetic construct
  misc_feature 1..20: note = Synthetic oligonucleotide
  source 1..20: mol_type = other DNA
gagagagatacagcctatgc

SEQ ID NO: 245 - DNA, 20 bp, synthetic construct
  misc_feature 1..20: note = Synthetic oligonucleotide
  source 1..20: mol_type = other DNA
ggcaggcctaaaccattaac

SEQ ID NO: 246 - DNA, 20 bp, synthetic construct
  misc_feature 1..20: note = Synthetic oligonucleotide
  source 1..20: mol_type = other DNA
gaagccaaagtagactgtac

SEQ ID NO: 247 - DNA, 20 bp, synthetic construct
  misc_feature 1..20: note = Synthetic oligonucleotide
  source 1..20: mol_type = other DNA
aagttgctctaaattccctc

SEQ ID NO: 248 - DNA, 20 bp, synthetic construct
  misc_feature 1..20: note = Synthetic oligonucleotide
  source 1..20: mol_type = other DNA
gagtgaagatgccagtaaac

SEQ ID NO: 249 - DNA, 20 bp, synthetic construct
  misc_feature 1..20: note = Synthetic oligonucleotide
  source 1..20: mol_type = other DNA
gttagcatgctccatataat

SEQ ID NO: 250 - DNA, 20 bp, synthetic construct
  misc_feature 1..20: note = Synthetic oligonucleotide
  source 1..20: mol_type = other DNA
tatatatatgtatggcatgc

SEQ ID NO: 251 - DNA, 20 bp, synthetic construct
  misc_feature 1..20: note = Synthetic oligonucleotide
  source 1..20: mol_type = other DNA
actccaagatgtgatggccc

SEQ ID NO: 252 - DNA, 20 bp, synthetic construct
  misc_feature 1..20: note = Synthetic oligonucleotide
  source 1..20: mol_type = other DNA
gcctggcccagatacatatt

SEQ ID NO: 253 - DNA, 20 bp, synthetic construct
  misc_feature 1..20: note = Synthetic oligonucleotide
  source 1..20: mol_type = other DNA
ggggaagcactgctgtaggt

SEQ ID NO: 254 - DNA, 20 bp, synthetic construct
  misc_feature 1..20: note = Synthetic oligonucleotide
  source 1..20: mol_type = other DNA
tgcacttgcccaagatcacc

SEQ ID NO: 255 - DNA, 20 bp, synthetic construct
  misc_feature 1..20: note = Synthetic oligonucleotide
  source 1..20: mol_type = other DNA
ctaaaggaggaaagattgag

SEQ ID NO: 256 - DNA, 20 bp, synthetic construct
  misc_feature 1..20: note = Synthetic oligonucleotide
  source 1..20: mol_type = other DNA
gcagttgttggggcttcagg

SEQ ID NO: 257 - DNA, 20 bp, synthetic construct
  misc_feature 1..20: note = Synthetic oligonucleotide
  source 1..20: mol_type = other DNA
gctagaacaagggtctttcc

SEQ ID NO: 258 - DNA, 20 bp, synthetic construct
  misc_feature 1..20: note = Synthetic oligonucleotide
  source 1..20: mol_type = other DNA
ctggcatcagctgatctccg

SEQ ID NO: 259 - DNA, 20 bp, synthetic construct
  misc_feature 1..20: note = Synthetic oligonucleotide
  source 1..20: mol_type = other DNA
tggcatcagctgatctccgg

SEQ ID NO: 260 - DNA, 20 bp, synthetic construct
  misc_feature 1..20: note = Synthetic oligonucleotide
  source 1..20: mol_type = other DNA
tcccaaacagaacaagacat

SEQ ID NO: 261 - DNA, 20 bp, synthetic construct
  misc_feature 1..20: note = Synthetic oligonucleotide
  source 1..20: mol_type = other DNA
tcagtaacaacaactcatgg

SEQ ID NO: 262 - DNA, 20 bp, synthetic construct
  misc_feature 1..20: note = Synthetic oligonucleotide
  source 1..20: mol_type = other DNA
gggatcaggattaggatatg

SEQ ID NO: 263 - DNA, 20 bp, synthetic construct
  misc_feature 1..20: note = Synthetic oligonucleotide
  source 1..20: mol_type = other DNA
acacccaaaagcttcagagg

SEQ ID NO: 264 - DNA, 20 bp, synthetic construct
  misc_feature 1..20: note = Synthetic oligonucleotide
  source 1..20: mol_type = other DNA
gaaaactggccctagaagat

SEQ ID NO: 265 - DNA, 20 bp, synthetic construct
  misc_feature 1..20: note = Synthetic oligonucleotide
  source 1..20: mol_type = other DNA
acattttaggtcggggtccc

SEQ ID NO: 266 - DNA, 20 bp, synthetic construct
  misc_feature 1..20: note = Synthetic oligonucleotide
  source 1..20: mol_type = other DNA
tgggtcgagcaagcaagtga

SEQ ID NO: 267 - DNA, 20 bp, synthetic construct
  misc_feature 1..20: note = Synthetic oligonucleotide
  source 1..20: mol_type = other DNA
ttaatgagttctataatgcc

SEQ ID NO: 268 - DNA, 20 bp, synthetic construct
  misc_feature 1..20: note = Synthetic oligonucleotide
  source 1..20: mol_type = other DNA
catccttagtcactaatgag

SEQ ID NO: 269 - DNA, 20 bp, synthetic construct
  misc_feature 1..20: note = Synthetic oligonucleotide
  source 1..20: mol_type = other DNA
cctctcgtctcttactccag

SEQ ID NO: 270 - DNA, 20 bp, synthetic construct
  misc_feature 1..20: note = Synthetic oligonucleotide
  source 1..20: mol_type = other DNA
gtacctctcactattcctct

SEQ ID NO: 271 - DNA, 20 bp, synthetic construct
  misc_feature 1..20: note = Synthetic oligonucleotide
  source 1..20: mol_type = other DNA
gagctcaagcacccctccca

SEQ ID NO: 272 - DNA, 20 bp, synthetic construct
  misc_feature 1..20: note = Synthetic oligonucleotide
  source 1..20: mol_type = other DNA
gccatgttgctcaatctgag

SEQ ID NO: 273 - DNA, 20 bp, synthetic construct
  misc_feature 1..20: note = Synthetic oligonucleotide
  source 1..20: mol_type = other DNA
tccaaatgaaacttcttccc

SEQ ID NO: 274 - DNA, 20 bp, synthetic construct
  misc_feature 1..20: note = Synthetic oligonucleotide
  source 1..20: mol_type = other DNA
ccttcgcctctgctggttcc

SEQ ID NO: 275 - DNA, 20 bp, synthetic construct
  misc_feature 1..20: note = Synthetic oligonucleotide
  source 1..20: mol_type = other DNA
ttgcctgtcctctcttgcca

SEQ ID NO: 276 - DNA, 20 bp, synthetic construct
  misc_feature 1..20: note = Synthetic oligonucleotide
  source 1..20: mol_type = other DNA
ggtttgcgtattcatcatct

SEQ ID NO: 277 - DNA, 20 bp, synthetic construct
  misc_feature 1..20: note = Synthetic oligonucleotide
  source 1..20: mol_type = other DNA
tgtccttcttcctccactga

SEQ ID NO: 278 - DNA, 20 bp, synthetic construct
  misc_feature 1..20: note = Synthetic oligonucleotide
  source 1..20: mol_type = other DNA
gcaccttggcctcgtaatgc

SEQ ID NO: 279 - DNA, 20 bp, synthetic construct
  misc_feature 1..20: note = Synthetic oligonucleotide
  source 1..20: mol_type = other DNA
cctgactagcctataaaaat

SEQ ID NO: 280 - DNA, 20 bp, synthetic construct
  misc_feature 1..20: note = Synthetic oligonucleotide
  source 1..20: mol_type = other DNA
tcaatctatttgcatccacc

SEQ ID NO: 281 - DNA, 20 bp, synthetic construct
  misc_feature 1..20: note = Synthetic oligonucleotide
  source 1..20: mol_type = other DNA
gcttacctgttctattgcac

SEQ ID NO: 282 - DNA, 20 bp, synthetic construct
  misc_feature 1..20: note = Synthetic oligonucleotide
  source 1..20: mol_type = other DNA
ggctattctttcaggttcat

SEQ ID NO: 283 - DNA, 20 bp, synthetic construct
  misc_feature 1..20: note = Synthetic oligonucleotide
  source 1..20: mol_type = other DNA
tatagatgagtctggtacaa

SEQ ID NO: 284 - DNA, 20 bp, synthetic construct
  misc_feature 1..20: note = Synthetic oligonucleotide
  source 1..20: mol_type = other DNA
ggagtaaaaaggcatcccac

SEQ ID NO: 285 - DNA, 20 bp, synthetic construct
  misc_feature 1..20: note = Synthetic oligonucleotide
  source 1..20: mol_type = other DNA
gggcgactcaaaagggaaag

SEQ ID NO: 286 - DNA, 20 bp, synthetic construct
  misc_feature 1..20: note = Synthetic oligonucleotide
  source 1..20: mol_type = other DNA
gaaaatggggactcgaacag

SEQ ID NO: 287 - DNA, 20 bp, synthetic construct
  misc_feature 1..20: note = Synthetic oligonucleotide
  source 1..20: mol_type = other DNA
agaatggtggttacaagagg

SEQ ID NO: 288 - DNA, 20 bp, synthetic construct
  misc_feature 1..20: note = Synthetic oligonucleotide
  source 1..20: mol_type = other DNA
gagtttcagctgggaagagg

SEQ ID NO: 289 - DNA, 20 bp, synthetic construct
  misc_feature 1..20: note = Synthetic oligonucleotide
  source 1..20: mol_type = other DNA
gtgaggagtttggggaagga

SEQ ID NO: 290 - DNA, 20 bp, synthetic construct
  misc_feature 1..20: note = Synthetic oligonucleotide
  source 1..20: mol_type = other DNA
ctgagagatgctgttaagtc

SEQ ID NO: 291 - DNA, 20 bp, synthetic construct
  misc_feature 1..20: note = Synthetic oligonucleotide
  source 1..20: mol_type = other DNA
tatccctttggccactggat

SEQ ID NO: 292 - DNA, 20 bp, synthetic construct
  misc_feature 1..20: note = Synthetic oligonucleotide
  source 1..20: mol_type = other DNA
gaggtcatttacaagtattc

SEQ ID NO: 293 - DNA, 20 bp, synthetic construct
  misc_feature 1..20: note = Synthetic oligonucleotide
  source 1..20: mol_type = other DNA
gcttgaggtgttaagagcta

SEQ ID NO: 294 - DNA, 20 bp, synthetic construct
  misc_feature 1..20: note = Synthetic oligonucleotide
  source 1..20: mol_type = other DNA
aggagattttcatcaggctt

SEQ ID NO: 295 - DNA, 20 bp, synthetic construct
  misc_feature 1..20: note = Synthetic oligonucleotide
  source 1..20: mol_type = other DNA
caagattgggtatgtacaac

SEQ ID NO: 296 - DNA, 20 bp, synthetic construct
  misc_feature 1..20: note = Synthetic oligonucleotide
  source 1..20: mol_type = other DNA
tgggtatgacttcagtgaaa

SEQ ID NO: 297 - DNA, 20 bp, synthetic construct
  misc_feature 1..20: note = Synthetic oligonucleotide
  source 1..20: mol_type = other DNA
gccagggaagactaaatatc

SEQ ID NO: 298 - DNA, 20 bp, synthetic construct
  misc_feature 1..20: note = Synthetic oligonucleotide
  source 1..20: mol_type = other DNA
ggtcggcaaccctagctatc

SEQ ID NO: 299 - DNA, 20 bp, synthetic construct
  misc_feature 1..20: note = Synthetic oligonucleotide
  source 1..20: mol_type = other DNA
gctgctctctgggccccaac

SEQ ID NO: 300 - DNA, 20 bp, synthetic construct
  misc_feature 1..20: note = Synthetic oligonucleotide
  source 1..20: mol_type = other DNA
gtgtggtgctctttcgctga

SEQ ID NO: 301 - DNA, 20 bp, synthetic construct
  misc_feature 1..20: note = Synthetic oligonucleotide
  source 1..20: mol_type = other DNA
ggtgctctttcgctgaagct

SEQ ID NO: 302 - DNA, 20 bp, synthetic construct
  misc_feature 1..20: note = Synthetic oligonucleotide
  source 1..20: mol_type = other DNA
tactacagtttctaagcagt

SEQ ID NO: 303 - DNA, 20 bp, synthetic construct
  misc_feature 1..20: note = Synthetic oligonucleotide
  source 1..20: mol_type = other DNA
gccactgtctctgtcctcat

SEQ ID NO: 304 - DNA, 20 bp, synthetic construct
  misc_feature 1..20: note = Synthetic oligonucleotide
  source 1..20: mol_type = other DNA
gctctcttccaggcatgtcc

SEQ ID NO: 305 - DNA, 20 bp, synthetic construct
  misc_feature 1..20: note = Synthetic oligonucleotide
  source 1..20: mol_type = other DNA
gaagggctaaattgatacca

SEQ ID NO: 306 - DNA, 20 bp, synthetic construct
  misc_feature 1..20: note = Synthetic oligonucleotide
  source 1..20: mol_type = other DNA
tctgagaacaatgaagagta

SEQ ID NO: 307 - DNA, 20 bp, synthetic construct
  misc_feature 1..20: note = Synthetic oligonucleotide
  source 1..20: mol_type = other DNA
ggtacaaaagctactcagcc

SEQ ID NO: 308 - DNA, 20 bp, synthetic construct
  misc_feature 1..20: note = Synthetic oligonucleotide
  source 1..20: mol_type = other DNA
agacctacatggcaaaaacg

SEQ ID NO: 309 - DNA, 20 bp, synthetic construct
  misc_feature 1..20: note = Synthetic oligonucleotide
  source 1..20: mol_type = other DNA
gccacaatgcgtcagggaaa

SEQ ID NO: 310 - DNA, 20 bp, synthetic construct
  misc_feature 1..20: note = Synthetic oligonucleotide
  source 1..20: mol_type = other DNA
ttgaaaaagtacgataatgt

SEQ ID NO: 311 - DNA, 20 bp, synthetic construct
  misc_feature 1..20: note = Synthetic oligonucleotide
  source 1..20: mol_type = other DNA
gcagcgaggagaaaaccacc

SEQ ID NO: 312 - DNA, 20 bp, synthetic construct
  misc_feature 1..20: note = Synthetic oligonucleotide
  source 1..20: mol_type = other DNA
cactgtggaaggaggaacac

SEQ ID NO: 313 - DNA, 20 bp, synthetic construct
  misc_feature 1..20: note = Synthetic oligonucleotide
  source 1..20: mol_type = other DNA
gttcaagagaagtggctgcc

SEQ ID NO: 314 - DNA, 20 bp, synthetic construct
  misc_feature 1..20: note = Synthetic oligonucleotide
  source 1..20: mol_type = other DNA
ccctccccatgagccaggac

SEQ ID NO: 315 - DNA, 20 bp, synthetic construct
  misc_feature 1..20: note = Synthetic oligonucleotide
  source 1..20: mol_type = other DNA
agctaggaccccaatccccc

SEQ ID NO: 316 - DNA, 20 bp, synthetic construct
  misc_feature 1..20: note = Synthetic oligonucleotide
  source 1..20: mol_type = other DNA
cttcttcaaaaacctccttc

SEQ ID NO: 317 - DNA, 20 bp, synthetic construct
  misc_feature 1..20: note = Synthetic oligonucleotide
  source 1..20: mol_type = other DNA
catgaaagggggtattagtg

SEQ ID NO: 318 - DNA, 20 bp, synthetic construct
  misc_feature 1..20: note = Synthetic oligonucleotide
  source 1..20: mol_type = other DNA
gccaccaaaagccttcctgt

SEQ ID NO: 319 - DNA, 20 bp, synthetic construct
  misc_feature 1..20: note = Synthetic oligonucleotide
  source 1..20: mol_type = other DNA
tttccccctcagtcttagtc

SEQ ID NO: 320 - DNA, 20 bp, synthetic construct
  misc_feature 1..20: note = Synthetic oligonucleotide
  source 1..20: mol_type = other DNA
cgcgcccggcctcgtacccc

SEQ ID NO: 321 - DNA, 20 bp, synthetic construct
  misc_feature 1..20: note = Synthetic oligonucleotide
  source 1..20: mol_type = other DNA
acaactaactggtcaacttc

SEQ ID NO: 322 - DNA, 20 bp, synthetic construct
  misc_feature 1..20: note = Synthetic oligonucleotide
  source 1..20: mol_type = other DNA
ctgatttcttctatttccct

SEQ ID NO: 323 - DNA, 20 bp, synthetic construct
  misc_feature 1..20: note = Synthetic oligonucleotide
  source 1..20: mol_type = other DNA
tccttttgcctcacctcttc

SEQ ID NO: 324 - DNA, 20 bp, synthetic construct
  misc_feature 1..20: note = Synthetic oligonucleotide
  source 1..20: mol_type = other DNA
gggccttttctcaatcccac

SEQ ID NO: 325 - DNA, 20 bp, synthetic construct
  misc_feature 1..20: note = Synthetic oligonucleotide
  source 1..20: mol_type = other DNA
aggacacatagctgataggc

SEQ ID NO: 326 - DNA, 20 bp, synthetic construct
  misc_feature 1..20: note = Synthetic oligonucleotide
  source 1..20: mol_type = other DNA
ctctcagcctttcccagcat

SEQ ID NO: 327 - DNA, 20 bp, synthetic construct
  misc_feature 1..20: note = Synthetic oligonucleotide
  source 1..20: mol_type = other DNA
tgcactggtgcccaactaca

SEQ ID NO: 328 - DNA, 20 bp, synthetic construct
  misc_feature 1..20: note = Synthetic oligonucleotide
  source 1..20: mol_type = other DNA
ttacccctactctgtgctcc

SEQ ID NO: 329 - DNA, 20 bp, synthetic construct
  misc_feature 1..20: note = Synthetic oligonucleotide
  source 1..20: mol_type = other DNA
ttcttcccctaaccatctga

SEQ ID NO: 330 - DNA, 20 bp, synthetic construct
  misc_feature 1..20: note = Synthetic oligonucleotide
  source 1..20: mol_type = other DNA
cactataaatccattgaggc

SEQ ID NO: 331 - DNA, 20 bp, synthetic construct
  misc_feature 1..20: note = Synthetic oligonucleotide
  source 1..20: mol_type = other DNA
atgaattccttttggctggg

SEQ ID NO: 332 - DNA, 20 bp, synthetic construct
  misc_feature 1..20: note = Synthetic oligonucleotide
  source 1..20: mol_type = other DNA
tcccttggctactacatagc

SEQ ID NO: 333 - DNA, 20 bp, synthetic construct
  misc_feature 1..20: note = Synthetic oligonucleotide
  source 1..20: mol_type = other DNA
agtatcgcaatacagcagca

SEQ ID NO: 334 - DNA, 20 bp, synthetic construct
  misc_feature 1..20: note = Synthetic oligonucleotide
  source 1..20: mol_type = other DNA
tttatggttatggaagacag

SEQ ID NO: 335 - DNA, 20 bp, synthetic construct
  misc_feature 1..20: note = Synthetic oligonucleotide
  source 1..20: mol_type = other DNA
gcctcttccacttacagtat

SEQ ID NO: 336 - DNA, 20 bp, synthetic construct
  misc_feature 1..20: note = Synthetic oligonucleotide
  source 1..20: mol_type = other DNA
gactatcttgtagcctatgg

SEQ ID NO: 337 - DNA, 20 bp, synthetic construct
  misc_feature 1..20: note = Synthetic oligonucleotide
  source 1..20: mol_type = other DNA
cttgtagcctatggagggtg

SEQ ID NO: 338 - DNA, 20 bp, synthetic construct
  misc_feature 1..20: note = Synthetic oligonucleotide
  source 1..20: mol_type = other DNA
gcctggagtgccagatctag

SEQ ID NO: 339 - DNA, 20 bp, synthetic construct
  misc_feature 1..20: note = Synthetic oligonucleotide
  source 1..20: mol_type = other DNA
gggagaggtggaagctagga

SEQ ID NO: 340 - DNA, 20 bp, synthetic construct
  misc_feature 1..20: note = Synthetic oligonucleotide
  source 1..20: mol_type = other DNA
ggtggaagctaggaggaaga

SEQ ID NO: 341 - DNA, 20 bp, synthetic construct
  misc_feature 1..20: note = Synthetic oligonucleotide
  source 1..20: mol_type = other DNA
gtcagccgggcgtggtggcc

SEQ ID NO: 342 - DNA, 20 bp, synthetic construct
  misc_feature 1..20: note = Synthetic oligonucleotide
  source 1..20: mol_type = other DNA
gtctggagtagcttccttgc

SEQ ID NO: 343 - DNA, 20 bp, synthetic construct
  misc_feature 1..20: note = Synthetic oligonucleotide
  source 1..20: mol_type = other DNA
ctctggggtcttccactgcc

SEQ ID NO: 344 - DNA, 20 bp, synthetic construct
  misc_feature 1..20: note = Synthetic oligonucleotide
  source 1..20: mol_type = other DNA
atgtgcaatatcagtatggc

SEQ ID NO: 345 - DNA, 20 bp, synthetic construct
  misc_feature 1..20: note = Synthetic oligonucleotide
  source 1..20: mol_type = other DNA
gccctaagacggaaatccat

SEQ ID NO: 346 - DNA, 20 bp, synthetic construct
  misc_feature 1..20: note = Synthetic oligonucleotide
  source 1..20: mol_type = other DNA
gctgtggaggggaactatga

SEQ ID NO: 347 - DNA, 20 bp, synthetic construct
  misc_feature 1..20: note = Synthetic oligonucleotide
  source 1..20: mol_type = other DNA
gaaagagagagaccaaaact

SEQ ID NO: 348 - DNA, 20 bp, synthetic construct
  misc_feature 1..20: note = Synthetic oligonucleotide
  source 1..20: mol_type = other DNA
catgttaaatggagtatgac

SEQ ID NO: 349 - DNA, 20 bp, synthetic construct
  misc_feature 1..20: note = Synthetic oligonucleotide
  source 1..20: mol_type = other DNA
tggcatcagaagagcaccga

SEQ ID NO: 350 - DNA, 20 bp, synthetic construct
  misc_feature 1..20: note = Synthetic oligonucleotide
  source 1..20: mol_type = other DNA
gtcagaccagttccctttac

SEQ ID NO: 351 - DNA, 20 bp, synthetic construct
  misc_feature 1..20: note = Synthetic oligonucleotide
  source 1..20: mol_type = other DNA
tactcacgggcatttaagtc

SEQ ID NO: 352 - DNA, 20 bp, synthetic construct
  misc_feature 1..20: note = Synthetic oligonucleotide
  source 1..20: mol_type = other DNA
ccataaatggggcaatttat

SEQ ID NO: 353 - DNA, 20 bp, synthetic construct
  misc_feature 1..20: note = Synthetic oligonucleotide
  source 1..20: mol_type = other DNA
ggcttacatgtatgacctga

SEQ ID NO: 354 - DNA, 20 bp, synthetic construct
  misc_feature 1..20: note = Synthetic oligonucleotide
  source 1..20: mol_type = other DNA
ccaaagcacaggtaacaaca

SEQ ID NO: 355 - DNA, 20 bp, synthetic construct
  misc_feature 1..20: note = Synthetic oligonucleotide
  source 1..20: mol_type = other DNA
tatggaatgggaaaagataa

SEQ ID NO: 356 - DNA, 20 bp, synthetic construct
  misc_feature 1..20: note = Synthetic oligonucleotide
  source 1..20: mol_type = other DNA
gacaacaagtggtgaggatg

SEQ ID NO: 357 - DNA, 20 bp, synthetic construct
  misc_feature 1..20: note = Synthetic oligonucleotide
  source 1..20: mol_type = other DNA
tggtagttaccaggggctgg

SEQ ID NO: 358 - DNA, 20 bp, synthetic construct
  misc_feature 1..20: note = Synthetic oligonucleotide
  source 1..20: mol_type = other DNA
ggtgagggggaaatggggag

SEQ ID NO: 359 - DNA, 20 bp, synthetic construct
  misc_feature 1..20: note = Synthetic oligonucleotide
  source 1..20: mol_type = other DNA
tcacaggagtcagacaatag

SEQ ID NO: 360 - DNA, 20 bp, synthetic construct
  misc_feature 1..20: note = Synthetic oligonucleotide
  source 1..20: mol_type = other DNA
cagtgttatggttgaagtag

SEQ ID NO: 361 - DNA, 20 bp, synthetic construct
  misc_feature 1..20: note = Synthetic oligonucleotide
  source 1..20: mol_type = other DNA
ggtctctgagggtatctgga

SEQ ID NO: 362 - DNA, 20 bp, synthetic construct
  misc_feature 1..20: note = Synthetic oligonucleotide
  source 1..20: mol_type = other DNA
ccaataccattcttaactga

SEQ ID NO: 363 - DNA, 20 bp, synthetic construct
  misc_feature 1..20: note = Synthetic oligonucleotide
  source 1..20: mol_type = other DNA
tagggttaagataatccacg

SEQ ID NO: 364 - DNA, 20 bp, synthetic construct
  misc_feature 1..20: note = Synthetic oligonucleotide
  source 1..20: mol_type = other DNA
gccaactcgcccagcccaca

SEQ ID NO: 365 - DNA, 20 bp, synthetic construct
  misc_feature 1..20: note = Synthetic oligonucleotide
  source 1..20: mol_type = other DNA
gaggcttgggtactgagaac

SEQ ID NO: 366 - DNA, 20 bp, synthetic construct
  misc_feature 1..20: note = Synthetic oligonucleotide
  source 1..20: mol_type = other DNA
ggttctctttgtctgttcta

SEQ ID NO: 367 - DNA, 20 bp, synthetic construct
  misc_feature 1..20: note = Synthetic oligonucleotide
  source 1..20: mol_type = other DNA
tcctggaagctaataatctg

SEQ ID NO: 368 - DNA, 20 bp, synthetic construct
  misc_feature 1..20: note = Synthetic oligonucleotide
  source 1..20: mol_type = other DNA
tatccctccccctagccccc

SEQ ID NO: 369 - DNA, 20 bp, synthetic construct
  misc_feature 1..20: note = Synthetic oligonucleotide
  source 1..20: mol_type = other DNA
gtctgtttgtatccttcacc

SEQ ID NO: 370 - DNA, 20 bp, synthetic construct
  misc_feature 1..20: note = Synthetic oligonucleotide
  source 1..20: mol_type = other DNA
tttggcctgagacaatgggg

SEQ ID NO: 371 - DNA, 20 bp, synthetic construct
  misc_feature 1..20: note = Synthetic oligonucleotide
  source 1..20: mol_type = other DNA
gctcctcgttgtacctctgg

SEQ ID NO: 372 - DNA, 20 bp, synthetic construct
  misc_feature 1..20: note = Synthetic oligonucleotide
  source 1..20: mol_type = other DNA
gtgtgatgtgttgctgagaa

SEQ ID NO: 373 - DNA, 20 bp, synthetic construct
  misc_feature 1..20: note = Synthetic oligonucleotide
  source 1..20: mol_type = other DNA
gggtcttgactcgttatcca

SEQ ID NO: 374 - DNA, 20 bp, synthetic construct
  misc_feature 1..20: note = Synthetic oligonucleotide
  source 1..20: mol_type = other DNA
gcagtggctgttaccgtttt

SEQ ID NO: 375 - DNA, 20 bp, synthetic construct
  misc_feature 1..20: note = Synthetic oligonucleotide
  source 1..20: mol_type = other DNA
ggtcccccactctcttctgg

SEQ ID NO: 376 - DNA, 20 bp, synthetic construct
  misc_feature 1..20: note = Synthetic oligonucleotide
  source 1..20: mol_type = other DNA
ggcttgcgtatgcttcatga

SEQ ID NO: 377 - DNA, 20 bp, synthetic construct
  misc_feature 1..20: note = Synthetic oligonucleotide
  source 1..20: mol_type = other DNA
gcaggtctgctggtgtttgc

SEQ ID NO: 378 - DNA, 20 bp, synthetic construct
  misc_feature 1..20: note = Synthetic oligonucleotide
  source 1..20: mol_type = other DNA
gctgtgctgagagatccact

SEQ ID NO: 379 - DNA, 20 bp, synthetic construct
  misc_feature 1..20: note = Synthetic oligonucleotide
  source 1..20: mol_type = other DNA
gggtcaccacaacatccgcc

SEQ ID NO: 380 - DNA, 20 bp, synthetic construct
  misc_feature 1..20: note = Synthetic oligonucleotide
  source 1..20: mol_type = other DNA
gatggaatagaagaaggcag

SEQ ID NO: 381 - DNA, 20 bp, synthetic construct
  misc_feature 1..20: note = Synthetic oligonucleotide
  source 1..20: mol_type = other DNA
atagaagaaggcagggggaa

SEQ ID NO: 382 - DNA, 20 bp, synthetic construct
  misc_feature 1..20: note = Synthetic oligonucleotide
  source 1..20: mol_type = other DNA
ttacatcagatgacacttgc

SEQ ID NO: 383 - DNA, 20 bp, synthetic construct
  misc_feature 1..20: note = Synthetic oligonucleotide
  source 1..20: mol_type = other DNA
gaaattattctgataaccca

SEQ ID NO: 384 - DNA, 20 bp, synthetic construct
  misc_feature 1..20: note = Synthetic oligonucleotide
  source 1..20: mol_type = other DNA
acagtccactggatgatgtt

SEQ ID NO: 385 - DNA, 20 bp, synthetic construct
  misc_feature 1..20: note = Synthetic oligonucleotide
  source 1..20: mol_type = other DNA
gtctcctccaggtttcagtt

SEQ ID NO: 386 - DNA, 20 bp, synthetic construct
  misc_feature 1..20: note = Synthetic oligonucleotide
  source 1..20: mol_type = other DNA
ggggtttgtatttctggcca

SEQ ID NO: 387 - DNA, 20 bp, synthetic construct
  misc_feature 1..20: note = Synthetic oligonucleotide
  source 1..20: mol_type = other DNA
ttatgggcagggcttggtgg

SEQ ID NO: 388 - DNA, 20 bp, synthetic construct
  misc_feature 1..20: note = Synthetic oligonucleotide
  source 1..20: mol_type = other DNA
ttgggaagctgaggaggtgg

SEQ ID NO: 389 - DNA, 20 bp, synthetic construct
  misc_feature 1..20: note = Synthetic oligonucleotide
  source 1..20: mol_type = other DNA
agaaatcaaaactgagacca

SEQ ID NO: 390 - DNA, 20 bp, synthetic construct
  misc_feature 1..20: note = Synthetic oligonucleotide
  source 1..20: mol_type = other DNA
ttcactgctcacaactacca

SEQ ID NO: 391 - DNA, 20 bp, synthetic construct
  misc_feature 1..20: note = Synthetic oligonucleotide
  source 1..20: mol_type = other DNA
accagtatgtccattctttc

SEQ ID NO: 392 - DNA, 20 bp, synthetic construct
  misc_feature 1..20: note = Synthetic oligonucleotide
  source 1..20: mol_type = other DNA
cttattagtcgtgctagcgg

SEQ ID NO: 393 - DNA, 20 bp, synthetic construct
  misc_feature 1..20: note = Synthetic oligonucleotide
  source 1..20: mol_type = other DNA
caagggctggagaggatgtg

SEQ ID NO: 394 - DNA, 20 bp, synthetic construct
  misc_feature 1..20: note = Synthetic oligonucleotide
  source 1..20: mol_type = other DNA
gagccactgcattcaacctc

SEQ ID NO: 395 - DNA, 20 bp, synthetic construct
  misc_feature 1..20: note = Synthetic oligonucleotide
  source 1..20: mol_type = other DNA
caggcacttcactaggtatt

SEQ ID NO: 396 - DNA, 20 bp, synthetic construct
  misc_feature 1..20: note = Synthetic oligonucleotide
  source 1..20: mol_type = other DNA
gacaaaacccagttggcttg

SEQ ID NO: 397 - DNA, 20 bp, synthetic construct
  misc_feature 1..20: note = Synthetic oligonucleotide
  source 1..20: mol_type = other DNA
acgcgttctaagccagaggg

SEQ ID NO: 398 - DNA, 20 bp, synthetic construct
  misc_feature 1..20: note = Synthetic oligonucleotide
  source 1..20: mol_type = other DNA
gatgggatatcaagtaggca

SEQ ID NO: 399 - DNA, 20 bp, synthetic construct
  misc_feature 1..20: note = Synthetic oligonucleotide
  source 1..20: mol_type = other DNA
gggctagacataaagtacag

SEQ ID NO: 400 - DNA, 20 bp, synthetic construct
  misc_feature 1..20: note = Synthetic oligonucleotide
  source 1..20: mol_type = other DNA
gccactgtagttgctgctgt

SEQ ID NO: 401 - DNA, 20 bp, synthetic construct
  misc_feature 1..20: note = Synthetic oligonucleotide
  source 1..20: mol_type = other DNA
aagatgggagggagtagaga

SEQ ID NO: 402 - DNA, 20 bp, synthetic construct
  misc_feature 1..20: note = Synthetic oligonucleotide
  source 1..20: mol_type = other DNA
cattgtcatcctttaacctc

SEQ ID NO: 403 - DNA, 20 bp, synthetic construct
  misc_feature 1..20: note = Synthetic oligonucleotide
  source 1..20: mol_type = other DNA
ttctgcagactggggcaggg

SEQ ID NO: 404 - DNA, 20 bp, synthetic construct
  misc_feature 1..20: note = Synthetic oligonucleotide
  source 1..20: mol_type = other DNA
gagttctcaccatattgccc

SEQ ID NO: 405 - DNA, 20 bp, synthetic construct
  misc_feature 1..20: note = Synthetic oligonucleotide
  source 1..20: mol_type = other DNA
tcaacgctcagctcttgtcc

SEQ ID NO: 406 - DNA, 20 bp, synthetic construct
  misc_feature 1..20: note = Synthetic oligonucleotide
  source 1..20: mol_type = other DNA
tttggccagcggggagaggg

SEQ ID NO: 407 - DNA, 20 bp, synthetic construct
  misc_feature 1..20: note = Synthetic oligonucleotide
  source 1..20: mol_type = other DNA
cttagggtagagtgcagtgg

SEQ ID NO: 408 - DNA, 20 bp, synthetic construct
  misc_feature 1..20: note = Synthetic oligonucleotide
  source 1..20: mol_type = other DNA
ctgatcctctattttgttcc

SEQ ID NO: 409 - DNA, 20 bp, synthetic construct
  misc_feature 1..20: note = Synthetic oligonucleotide
  source 1..20: mol_type = other DNA
cagacactacccccacccca

SEQ ID NO: 410 - DNA, 20 bp, synthetic construct
  misc_feature 1..20: note = Synthetic oligonucleotide
  source 1..20: mol_type = other DNA
ctgtacgatgcttcggagtg

SEQ ID NO: 411 - DNA, 20 bp, synthetic construct
  misc_feature 1..20: note = Synthetic oligonucleotide
  source 1..20: mol_type = other DNA
ggatccatttggctatgtta

SEQ ID NO: 412 - DNA, 20 bp, synthetic construct
  misc_feature 1..20: note = Synthetic oligonucleotide
  source 1..20: mol_type = other DNA
cacaggaggagataggaggt

SEQ ID NO: 413 - DNA, 20 bp, synthetic construct
  misc_feature 1..20: note = Synthetic oligonucleotide
  source 1..20: mol_type = other DNA
aacccacaatcagcaggcct

SEQ ID NO: 414 - DNA, 20 bp, synthetic construct
  misc_feature 1..20: note = Synthetic oligonucleotide
  source 1..20: mol_type = other DNA
aattttctcccaaaacccat

SEQ ID NO: 415 - DNA, 20 bp, synthetic construct
  misc_feature 1..20: note = Synthetic oligonucleotide
  source 1..20: mol_type = other DNA
gctttgcatggaaatacaaa

SEQ ID NO: 416 - DNA, 20 bp, synthetic construct
  misc_feature 1..20: note = Synthetic oligonucleotide
  source 1..20: mol_type = other DNA
ggaaaactgccatgtgtctt

SEQ ID NO: 417 - DNA, 20 bp, synthetic construct
  misc_feature 1..20: note = Synthetic oligonucleotide
  source 1..20: mol_type = other DNA
gagggaggactgcgtgatcc

SEQ ID NO: 418 - DNA, 20 bp, synthetic construct
  misc_feature 1..20: note = Synthetic oligonucleotide
  source 1..20: mol_type = other DNA
atagcaggacagatggacgc

SEQ ID NO: 419 - DNA, 20 bp, synthetic construct
  misc_feature 1..20: note = Synthetic oligonucleotide
  source 1..20: mol_type = other DNA
ggccaggcaaagtggctccc

SEQ ID NO: 420 - DNA, 20 bp, synthetic construct
  misc_feature 1..20: note = Synthetic oligonucleotide
  source 1..20: mol_type = other DNA
tgtacaaatacagcaaagct

SEQ ID NO: 421 - DNA, 20 bp, synthetic construct
  misc_feature 1..20: note = Synthetic oligonucleotide
  source 1..20: mol_type = other DNA
gcacaatgtccttctttcca

SEQ ID NO: 422 - DNA, 20 bp, synthetic construct
  misc_feature 1..20: note = Synthetic oligonucleotide
  source 1..20: mol_type = other DNA
acatgtaaggcaatgtgcag

SEQ ID NO: 423 - DNA, 20 bp, synthetic construct
  misc_feature 1..20: note = Synthetic oligonucleotide
  source 1..20: mol_type = other DNA
atgagaattctgatggagga

SEQ ID NO: 424 - DNA, 20 bp, synthetic construct
  misc_feature 1..20: note = Synthetic oligonucleotide
  source 1..20: mol_type = other DNA
ctggaagtagtcaacaatgt

SEQ ID NO: 425 - DNA, 20 bp, synthetic construct
  misc_feature 1..20: note = Synthetic oligonucleotide
  source 1..20: mol_type = other DNA
gagacaccgagagacagaga

SEQ ID NO: 426 - DNA, 20 bp, synthetic construct
  misc_feature 1..20: note = Synthetic oligonucleotide
  source 1..20: mol_type = other DNA
gagggacgaagaggccaggg

SEQ ID NO: 427 - DNA, 20 bp, synthetic construct
  misc_feature 1..20: note = Synthetic oligonucleotide
  source 1..20: mol_type = other DNA
gcaacccagaagacagccct

SEQ ID NO: 428 - DNA, 20 bp, synthetic construct
  misc_feature 1..20: note = Synthetic oligonucleotide
  source 1..20: mol_type = other DNA
ggaatacatcgcaggagaga

SEQ ID NO: 429 - DNA, 20 bp, synthetic construct
  misc_feature 1..20: note = Synthetic oligonucleotide
  source 1..20: mol_type = other DNA
gagtaagggagaggcatatg

SEQ ID NO: 430 - DNA, 20 bp, synthetic construct
  misc_feature 1..20: note = Synthetic oligonucleotide
  source 1..20: mol_type = other DNA
catttccttctccctcagcc

SEQ ID NO: 431 - DNA, 20 bp, synthetic construct
  misc_feature 1..20: note = Synthetic oligonucleotide
  source 1..20: mol_type = other DNA
gatccattagagttacatta

SEQ ID NO: 432 - DNA, 20 bp, synthetic construct
  misc_feature 1..20: note = Synthetic oligonucleotide
  source 1..20: mol_type = other DNA
atctcgtgatttttgaaagc

SEQ ID NO: 433 - DNA, 20 bp, synthetic construct
  misc_feature 1..20: note = Synthetic oligonucleotide
  source 1..20: mol_type = other DNA
agcaaaggacttacaagaca

SEQ ID NO: 434 - DNA, 20 bp, synthetic construct
  misc_feature 1..20: note = Synthetic oligonucleotide
  source 1..20: mol_type = other DNA
ggagagcaatcaagtatagt

SEQ ID NO: 435 - DNA, 20 bp, synthetic construct
  misc_feature 1..20: note = Synthetic oligonucleotide
  source 1..20: mol_type = other DNA
ggcaaaaatggacagaccac

SEQ ID NO: 436 - DNA, 20 bp, synthetic construct
  misc_feature 1..20: note = Synthetic oligonucleotide
  source 1..20: mol_type = other DNA
gtgcaacgtttgtctagggg

SEQ ID NO: 437 - DNA, 20 bp, synthetic construct
  misc_feature 1..20: note = Synthetic oligonucleotide
  source 1..20: mol_type = other DNA
gagtaaggtggagggaaaag

SEQ ID NO: 438 - DNA, 20 bp, synthetic construct
  misc_feature 1..20: note = Synthetic oligonucleotide
  source 1..20: mol_type = other DNA
atggggtgggtgaggcagag

SEQ ID NO: 439 - DNA, 20 bp, synthetic construct
  misc_feature 1..20: note = Synthetic oligonucleotide
  source 1..20: mol_type = other DNA
ccttgctctactagtcctca

SEQ ID NO: 440 - DNA, 20 bp, synthetic construct
  misc_feature 1..20: note = Synthetic oligonucleotide
  source 1..20: mol_type = other DNA
ggctggttggatgtcttctt

SEQ ID NO: 441 - DNA, 20 bp, synthetic construct
  misc_feature 1..20: note = Synthetic oligonucleotide
  source 1..20: mol_type = other DNA
aagacctacctagacatcca

SEQ ID NO: 442 - DNA, 20 bp, synthetic construct
  misc_feature 1..20: note = Synthetic oligonucleotide
  source 1..20: mol_type = other DNA
gaactaccacgggagtcact

SEQ ID NO: 443 - DNA, 20 bp, synthetic construct
  misc_feature 1..20: note = Synthetic oligonucleotide
  source 1..20: mol_type = other DNA
gaggtcagattctaggggac

SEQ ID NO: 444 - DNA, 20 bp, synthetic construct
  misc_feature 1..20: note = Synthetic oligonucleotide
  source 1..20: mol_type = other DNA
gcagagaaaacagacaactg

SEQ ID NO: 445 - DNA, 20 bp, synthetic construct
  misc_feature 1..20: note = Synthetic oligonucleotide
  source 1..20: mol_type = other DNA
cagaatctgaggtggaggag

SEQ ID NO: 446 - DNA, 20 bp, synthetic construct
  misc_feature 1..20: note = Synthetic oligonucleotide
  source 1..20: mol_type = other DNA
ggtgaaggcaagtaagggaa

SEQ ID NO: 447 - DNA, 20 bp, synthetic construct
  misc_feature 1..20: note = Synthetic oligonucleotide
  source 1..20: mol_type = other DNA
gcacatgtctgtggtgatgc

SEQ ID NO: 448 - DNA, 20 bp, synthetic construct
  misc_feature 1..20: note = Synthetic oligonucleotide
  source 1..20: mol_type = other DNA
gcagatccttcaggaggtat

SEQ ID NO: 449 - DNA, 20 bp, synthetic construct
  misc_feature 1..20: note = Synthetic oligonucleotide
  source 1..20: mol_type = other DNA
gtggagatggaagatagtgg

SEQ ID NO: 450 - DNA, 20 bp, synthetic construct
  misc_feature 1..20: note = Synthetic oligonucleotide
  source 1..20: mol_type = other DNA
gctgtacaatgtttgtgtcc

SEQ ID NO: 451 - DNA, 20 bp, synthetic construct
  misc_feature 1..20: note = Synthetic oligonucleotide
  source 1..20: mol_type = other DNA
gatgcagtctcagtctatcg

SEQ ID NO: 452 - DNA, 20 bp, synthetic construct
  misc_feature 1..20: note = Synthetic oligonucleotide
  source 1..20: mol_type = other DNA
gcccggcctactttttatct

SEQ ID NO: 453 - DNA, 20 bp, synthetic construct
  misc_feature 1..20: note = Synthetic oligonucleotide
  source 1..20: mol_type = other DNA
agagccccatcattcactgg

SEQ ID NO: 454 - DNA, 20 bp, synthetic construct
  misc_feature 1..20: note = Synthetic oligonucleotide
  source 1..20: mol_type = other DNA
gggaacgtagtgatgggaca

SEQ ID NO: 455 - DNA, 20 bp, synthetic construct
  misc_feature 1..20: note = Synthetic oligonucleotide
  source 1..20: mol_type = other DNA
acgcaaagaaggagagtggg

SEQ ID NO: 456 - DNA, 20 bp, synthetic construct
  misc_feature 1..20: note = Synthetic oligonucleotide
  source 1..20: mol_type = other DNA
ggaggctataatcacagggc

SEQ ID NO: 457 - DNA, 20 bp, synthetic construct
  misc_feature 1..20: note = Synthetic oligonucleotide
  source 1..20: mol_type = other DNA
tagtgagagaatggtttggg

SEQ ID NO: 458 - DNA, 20 bp, synthetic construct
  misc_feature 1..20: note = Synthetic oligonucleotide
  source 1..20: mol_type = other DNA
gggctggcccagatctgcct

SEQ ID NO: 459 - DNA, 20 bp, synthetic construct
  misc_feature 1..20: note = Synthetic oligonucleotide
  source 1..20: mol_type = other DNA
ctcactctcctggcaaactc

SEQ ID NO: 460 - DNA, 20 bp, synthetic construct
  misc_feature 1..20: note = Synthetic oligonucleotide
  source 1..20: mol_type = other DNA
gcagagttagctactgagtt

SEQ ID NO: 461 - DNA, 20 bp, synthetic construct
  misc_feature 1..20: note = Synthetic oligonucleotide
  source 1..20: mol_type = other DNA
gcatactacatgggtgaacc

SEQ ID NO: 462 - DNA, 20 bp, synthetic construct
  misc_feature 1..20: note = Synthetic oligonucleotide
  source 1..20: mol_type = other DNA
ggggagatgaaatgttctgg

SEQ ID NO: 463 - DNA, 20 bp, synthetic construct
  misc_feature 1..20: note = Synthetic oligonucleotide
  source 1..20: mol_type = other DNA
agaagagtagattttatgga

SEQ ID NO: 464 - DNA, 20 bp, synthetic construct
  misc_feature 1..20: note = Synthetic oligonucleotide
  source 1..20: mol_type = other DNA
ttaggttaggcaaagagttc

SEQ ID NO: 465 - DNA, 20 bp, synthetic construct
  misc_feature 1..20: note = Synthetic oligonucleotide
  source 1..20: mol_type = other DNA
ggccacggccgggcgcggtg

SEQ ID NO: 466 - DNA, 20 bp, synthetic construct
  misc_feature 1..20: note = Synthetic oligonucleotide
  source 1..20: mol_type = other DNA
tcagcaattcctctcacagg

SEQ ID NO: 467 - DNA, 20 bp, synthetic construct
  misc_feature 1..20: note = Synthetic oligonucleotide
  source 1..20: mol_type = other DNA
gacacaatggggcacctact

SEQ ID NO: 468 - DNA, 20 bp, synthetic construct
  misc_feature 1..20: note = Synthetic oligonucleotide
  source 1..20: mol_type = other DNA
gatcagggatagggagtgag

SEQ ID NO: 469 - DNA, 20 bp, synthetic construct
  misc_feature 1..20: note = Synthetic oligonucleotide
  source 1..20: mol_type = other DNA
gaggtgtgcataagcaggtc

SEQ ID NO: 470 - DNA, 20 bp, synthetic construct
  misc_feature 1..20: note = Synthetic oligonucleotide
  source 1..20: mol_type = other DNA
tcaagtgatgggcaggggag

SEQ ID NO: 471 - DNA, 20 bp, synthetic construct
  misc_feature 1..20: note = Synthetic oligonucleotide
  source 1..20: mol_type = other DNA
ctatgaaggcaggctggagc

SEQ ID NO: 472 - DNA, 20 bp, synthetic construct
  misc_feature 1..20: note = Synthetic oligonucleotide
  source 1..20: mol_type = other DNA
ggacctgaagactatatggg

SEQ ID NO: 473 - DNA, 20 bp, synthetic construct
  misc_feature 1..20: note = Synthetic oligonucleotide
  source 1..20: mol_type = other DNA
ggtctgaggagaatggctgg

SEQ ID NO: 474 - DNA, 20 bp, synthetic construct
  misc_feature 1..20: note = Synthetic oligonucleotide
  source 1..20: mol_type = other DNA
gcagagaagccagggaagat

SEQ ID NO: 475 - DNA, 20 bp, synthetic construct
  misc_feature 1..20: note = Synthetic oligonucleotide
  source 1..20: mol_type = other DNA
gacagactactagagaggaa

SEQ ID NO: 476 - DNA, 20 bp, synthetic construct
  misc_feature 1..20: note = Synthetic oligonucleotide
  source 1..20: mol_type = other DNA
ttcagtggaggcagtgggga

SEQ ID NO: 477 - DNA, 20 bp, synthetic construct
  misc_feature 1..20: note = Synthetic oligonucleotide
  source 1..20: mol_type = other DNA
cagtgaggaatagtgtgacc

SEQ ID NO: 478 - DNA, 20 bp, synthetic construct
  misc_feature 1..20: note = Synthetic oligonucleotide
  source 1..20: mol_type = other DNA
tcaggtagaagaagtgaggc

SEQ ID NO: 479 - DNA, 20 bp, synthetic construct
  misc_feature 1..20: note = Synthetic oligonucleotide
  source 1..20: mol_type = other DNA
gacacagtatcccgggcaag

SEQ ID NO: 480 - DNA, 20 bp, synthetic construct
  misc_feature 1..20: note = Synthetic oligonucleotide
  source 1..20: mol_type = other DNA
gcagaatacacttaatgagg

SEQ ID NO: 481 - DNA, 20 bp, synthetic construct
  misc_feature 1..20: note = Synthetic oligonucleotide
  source 1..20: mol_type = other DNA
agcatatgtgaggtgggtgg

SEQ ID NO: 482 - DNA, 20 bp, synthetic construct
  misc_feature 1..20: note = Synthetic oligonucleotide
  source 1..20: mol_type = other DNA
ttgggggcccagctgagtgg

SEQ ID NO: 483 - DNA, 20 bp, synthetic construct
  misc_feature 1..20: note = Synthetic oligonucleotide
  source 1..20: mol_type = other DNA
gactagctgaggaaatgtgg

SEQ ID NO: 484 - DNA, 20 bp, synthetic construct
  misc_feature 1..20: note = Synthetic oligonucleotide
  source 1..20: mol_type = other DNA
ggagctgataggagaaaagg

SEQ ID NO: 485 - DNA, 20 bp, synthetic construct
  misc_feature 1..20: note = Synthetic oligonucleotide
  source 1..20: mol_type = other DNA
ggtagagaataagagaagga

SEQ ID NO: 486 - DNA, 20 bp, synthetic construct
  misc_feature 1..20: note = Synthetic oligonucleotide
  source 1..20: mol_type = other DNA
gtgggcaaccatctggtaca

SEQ ID NO: 487 - DNA, 20 bp, synthetic construct
  misc_feature 1..20: note = Synthetic oligonucleotide
  source 1..20: mol_type = other DNA
agttgggtagtgtgtggcaa

SEQ ID NO: 488 - DNA, 20 bp, synthetic construct
  misc_feature 1..20: note = Synthetic oligonucleotide
  source 1..20: mol_type = other DNA
agtggggacacaaggaagga

SEQ ID NO: 489 - DNA, 20 bp, synthetic construct
  misc_feature 1..20: note = Synthetic oligonucleotide
  source 1..20: mol_type = other DNA
aagctcacttcatagagggg

SEQ ID NO: 490 - DNA, 20 bp, synthetic construct
  misc_feature 1..20: note = Synthetic oligonucleotide
  source 1..20: mol_type = other DNA
aagttctgattccctttacc

SEQ ID NO: 491 - DNA, 20 bp, synthetic construct
  misc_feature 1..20: note = Synthetic oligonucleotide
  source 1..20: mol_type = other DNA
tcttcttttcacctgtagcc

SEQ ID NO: 492 - DNA, 20 bp, synthetic construct
  misc_feature 1..20: note = Synthetic oligonucleotide
  source 1..20: mol_type = other DNA
gaaccacaagctattttaag

SEQ ID NO: 493 - DNA, 20 bp, synthetic construct
  misc_feature 1..20: note = Synthetic oligonucleotide
  source 1..20: mol_type = other DNA
cccagatgttatttatagtg

SEQ ID NO: 494 - DNA, 20 bp, synthetic construct
  misc_feature 1..20: note = Synthetic oligonucleotide
  source 1..20: mol_type = other DNA
ctggttcttggtggggaggg

SEQ ID NO: 495 - DNA, 20 bp, synthetic construct
  misc_feature 1..20: note = Synthetic oligonucleotide
  source 1..20: mol_type = other DNA
ggctagccttatctggatcc

SEQ ID NO: 496 - DNA, 20 bp, synthetic construct
  misc_feature 1..20: note = Synthetic oligonucleotide
  source 1..20: mol_type = other DNA
agatgctggtgaggccgtgg

SEQ ID NO: 497 - DNA, 20 bp, synthetic construct
  misc_feature 1..20: note = Synthetic oligonucleotide
  source 1..20: mol_type = other DNA
acatggaggcggctggaagc

SEQ ID NO: 498 - DNA, 20 bp, synthetic construct
  misc_feature 1..20: note = Synthetic oligonucleotide
  source 1..20: mol_type = other DNA
gagggaaaaagcatgggtgg

SEQ ID NO: 499 - DNA, 20 bp, synthetic construct
  misc_feature 1..20: note = Synthetic oligonucleotide
  source 1..20: mol_type = other DNA
aggctccttgggggaatata

SEQ ID NO: 500 - DNA, 20 bp, synthetic construct
  misc_feature 1..20: note = Synthetic oligonucleotide
  source 1..20: mol_type = other DNA
agaagggaaggagggaagga

SEQ ID NO: 501 - DNA, 20 bp, synthetic construct
  misc_feature 1..20: note = Synthetic oligonucleotide
  source 1..20: mol_type = other DNA
tgacagcaaagtatatggtc

SEQ ID NO: 502 - DNA, 20 bp, synthetic construct
  misc_feature 1..20: note = Synthetic oligonucleotide
  source 1..20: mol_type = other DNA
gggcatacaaattggaaagg

SEQ ID NO: 503 - DNA, 20 bp, synthetic construct
  misc_feature 1..20: note = Synthetic oligonucleotide
  source 1..20: mol_type = other DNA
cactacccaaagtaatctgc

SEQ ID NO: 504 - DNA, 20 bp, synthetic construct
  misc_feature 1..20: note = Synthetic oligonucleotide
  source 1..20: mol_type = other DNA
gctgccaagaacatacattt

SEQ ID NO: 505 - DNA, 20 bp, synthetic construct
  misc_feature 1..20: note = Synthetic oligonucleotide
  source 1..20: mol_type = other DNA
agaatgtataaggagctcga

SEQ ID NO: 506 - DNA, 20 bp, synthetic construct
  misc_feature 1..20: note = Synthetic oligonucleotide
  source 1..20: mol_type = other DNA
gtatgaccactacggagaac

SEQ ID NO: 507 - DNA, 20 bp, synthetic construct
  misc_feature 1..20: note = Synthetic oligonucleotide
  source 1..20: mol_type = other DNA
ggcagggggagtgaggatgg

SEQ ID NO: 508 - DNA, 20 bp, synthetic construct
  misc_feature 1..20: note = Synthetic oligonucleotide
  source 1..20: mol_type = other DNA
ggtcccttctcacattgctg

SEQ ID NO: 509 - DNA, 20 bp, synthetic construct
  misc_feature 1..20: note = Synthetic oligonucleotide
  source 1..20: mol_type = other DNA
aggcgaagaaggaggcacct

SEQ ID NO: 510 - DNA, 20 bp, synthetic construct
  misc_feature 1..20: note = Synthetic oligonucleotide
  source 1..20: mol_type = other DNA
tggattaggggtgtcaggcc

SEQ ID NO: 511 - DNA, 20 bp, synthetic construct
  misc_feature 1..20: note = Synthetic oligonucleotide
  source 1..20: mol_type = other DNA
gaaccagaactacacatgca

SEQ ID NO: 512 - DNA, 20 bp, synthetic construct
  misc_feature 1..20: note = Synthetic oligonucleotide
  source 1..20: mol_type = other DNA
aactcctcactcagatatca

SEQ ID NO: 513 - DNA, 20 bp, synthetic construct
  misc_feature 1..20: note = Synthetic oligonucleotide
  source 1..20: mol_type = other DNA
gaggttgagacaggaggact

SEQ ID NO: 514 - DNA, 20 bp, synthetic construct
  misc_feature 1..20: note = Synthetic oligonucleotide
  source 1..20: mol_type = other DNA
ggcaaaccctgaggatatgt

SEQ ID NO: 515 - DNA, 20 bp, synthetic construct
  misc_feature 1..20: note = Synthetic oligonucleotide
  source 1..20: mol_type = other DNA
ctgatattggcttctgttcc

SEQ ID NO: 516 - DNA, 20 bp, synthetic construct
  misc_feature 1..20: note = Synthetic oligonucleotide
  source 1..20: mol_type = other DNA
gttctccatctcccttttca

SEQ ID NO: 517 - DNA, 20 bp, synthetic construct
  misc_feature 1..20: note = Synthetic oligonucleotide
  source 1..20: mol_type = other DNA
cttcttctcatgctctgctg

SEQ ID NO: 518 - DNA, 20 bp, synthetic construct
  misc_feature 1..20: note = Synthetic oligonucleotide
  source 1..20: mol_type = other DNA
aaagggtcttgctatgtggc

SEQ ID NO: 519 - DNA, 20 bp, synthetic construct
  misc_feature 1..20: note = Synthetic oligonucleotide
  source 1..20: mol_type = other DNA
tacagatatatgagagggga

SEQ ID NO: 520 - DNA, 20 bp, synthetic construct
  misc_feature 1..20: note = Synthetic oligonucleotide
  source 1..20: mol_type = other DNA
ggtgtaattctcagtctgag

SEQ ID NO: 521 - DNA, 20 bp, synthetic construct
  misc_feature 1..20: note = Synthetic oligonucleotide
  source 1..20: mol_type = other DNA
tatcactgcaactctactgc

SEQ ID NO: 522 - DNA, 20 bp, synthetic construct
  misc_feature 1..20: note = Synthetic oligonucleotide
  source 1..20: mol_type = other DNA
gcaggtaggaccatcagtga

SEQ ID NO: 523 - DNA, 20 bp, synthetic construct
  misc_feature 1..20: note = Synthetic oligonucleotide
  source 1..20: mol_type = other DNA
aataccataggaagaagctg

SEQ ID NO: 524 - DNA, 20 bp, synthetic construct
  misc_feature 1..20: note = Synthetic oligonucleotide
  source 1..20: mol_type = other DNA
gctaatctcagttccaaaga

SEQ ID NO: 525 - DNA, 20 bp, synthetic construct
  misc_feature 1..20: note = Synthetic oligonucleotide
  source 1..20: mol_type = other DNA
gggatagtcagctgcttggc

SEQ ID NO: 526 - DNA, 20 bp, synthetic construct
  misc_feature 1..20: note = Synthetic oligonucleotide
  source 1..20: mol_type = other DNA
ggcctatgtggtttaacttt

SEQ ID NO: 527 - DNA, 20 bp, synthetic construct
  misc_feature 1..20: note = Synthetic oligonucleotide
  source 1..20: mol_type = other DNA
ggccaccatggtgaagcccc

SEQ ID NO: 528 - DNA, 20 bp, synthetic construct
  misc_feature 1..20: note = Synthetic oligonucleotide
  source 1..20: mol_type = other DNA
tccagcgtgggcgagagagc

SEQ ID NO: 529 - DNA, 20 bp, synthetic construct
  misc_feature 1..20: note = Synthetic oligonucleotide
  source 1..20: mol_type = other DNA
ctggattatgatcaatacac

SEQ ID NO: 530 - DNA, 20 bp, synthetic construct
  misc_feature 1..20: note = Synthetic oligonucleotide
  source 1..20: mol_type = other DNA
aagtatctaaaatcttggca

SEQ ID NO: 531 - DNA, 20 bp, synthetic construct
  misc_feature 1..20: note = Synthetic oligonucleotide
  source 1..20: mol_type = other DNA
gcacaactgtcaacccaggt

SEQ ID NO: 532 - DNA, 20 bp, synthetic construct
  misc_feature 1..20: note = Synthetic oligonucleotide
  source 1..20: mol_type = other DNA
gggaccgggagcctttaaga

SEQ ID NO: 533 - DNA, 20 bp, synthetic construct
  misc_feature 1..20: note = Synthetic oligonucleotide
  source 1..20: mol_type = other DNA
gtacatgactacgagaaaat

SEQ ID NO: 534 - DNA, 20 bp, synthetic construct
  misc_feature 1..20: note = Synthetic oligonucleotide
  source 1..20: mol_type = other DNA
ggtctggtccagagtaagag

SEQ ID NO: 535 - DNA, 20 bp, synthetic construct
  misc_feature 1..20: note = Synthetic oligonucleotide
  source 1..20: mol_type = other DNA
tagctggttcatgaaataga

SEQ ID NO: 536 - DNA, 20 bp, synthetic construct
  misc_feature 1..20: note = Synthetic oligonucleotide
  source 1..20: mol_type = other DNA
gtctttcagtgggtttgtat

SEQ ID NO: 537 - DNA, 20 bp, synthetic construct
  misc_feature 1..20: note = Synthetic oligonucleotide
  source 1..20: mol_type = other DNA
tcctcacacccaacatgcca

SEQ ID NO: 538 - DNA, 20 bp, synthetic construct
  misc_feature 1..20: note = Synthetic oligonucleotide
  source 1..20: mol_type = other DNA
cctcaattacttgtctataa

SEQ ID NO: 539 - DNA, 20 bp, synthetic construct
  misc_feature 1..20: note = Synthetic oligonucleotide
  source 1..20: mol_type = other DNA
ccctccccactccccacaac

SEQ ID NO: 540 - DNA, 20 bp, synthetic construct
  misc_feature 1..20: note = Synthetic oligonucleotide
  source 1..20: mol_type = other DNA
actcttaaggcagaacatga

SEQ ID NO: 541 - DNA, 20 bp, synthetic construct
  misc_feature 1..20: note = Synthetic oligonucleotide
  source 1..20: mol_type = other DNA
agcgttcctctccctctcca

SEQ ID NO: 542 - DNA, 20 bp, synthetic construct
  misc_feature 1..20: note = Synthetic oligonucleotide
  source 1..20: mol_type = other DNA
tccatcccttctagtctcct

SEQ ID NO: 543 - DNA, 20 bp, synthetic construct
  misc_feature 1..20: note = Synthetic oligonucleotide
  source 1..20: mol_type = other DNA
gttccattccacctacgcac

SEQ ID NO: 544 - DNA, 20 bp, synthetic construct
  misc_feature 1..20: note = Synthetic oligonucleotide
  source 1..20: mol_type = other DNA
aggggctcgatgtgggggag

SEQ ID NO: 545 - DNA, 20 bp, synthetic construct
  misc_feature 1..20: note = Synthetic oligonucleotide
  source 1..20: mol_type = other DNA
ccatgcctactcttccctcc

SEQ ID NO: 546 - DNA, 20 bp, synthetic construct
  misc_feature 1..20: note = Synthetic oligonucleotide
  source 1..20: mol_type = other DNA
cttcttctccttcacatccc

SEQ ID NO: 547 - DNA, 20 bp, synthetic construct
  misc_feature 1..20: note = Synthetic oligonucleotide
  source 1..20: mol_type = other DNA
tcttcccactctgtcccatt

SEQ ID NO: 548 - DNA, 20 bp, synthetic construct
  misc_feature 1..20: note = Synthetic oligonucleotide
  source 1..20: mol_type = other DNA
acccttcctgatgctattcc

SEQ ID NO: 549 - DNA, 20 bp, synthetic construct
  misc_feature 1..20: note = Synthetic oligonucleotide
  source 1..20: mol_type = other DNA
gctcctagatcagggattct

SEQ ID NO: 550 - DNA, 20 bp, synthetic construct
  misc_feature 1..20: note = Synthetic oligonucleotide
  source 1..20: mol_type = other DNA
tgcaatctgctgacccacac

SEQ ID NO: 551 - DNA, 20 bp, synthetic construct
  misc_feature 1..20: note = Synthetic oligonucleotide
  source 1..20: mol_type = other DNA
gatccactgctaggtcttgt

SEQ ID NO: 552 - DNA, 20 bp, synthetic construct
  misc_feature 1..20: note = Synthetic oligonucleotide
  source 1..20: mol_type = other DNA
ttaccaggttgctagagggg

SEQ ID NO: 553 - DNA, 20 bp, synthetic construct
  misc_feature 1..20: note = Synthetic oligonucleotide
  source 1..20: mol_type = other DNA
aaaagagggagcagggggag

SEQ ID NO: 554 - DNA, 20 bp, synthetic construct
  misc_feature 1..20: note = Synthetic oligonucleotide
  source 1..20: mol_type = other DNA
ttgaaagtcacacacctatc

SEQ ID NO: 555 - DNA, 20 bp, synthetic construct
  misc_feature 1..20: note = Synthetic oligonucleotide
  source 1..20: mol_type = other DNA
gtcacacacctatctttcat

SEQ ID NO: 556 - DNA, 20 bp, synthetic construct
  misc_feature 1..20: note = Synthetic oligonucleotide
  source 1..20: mol_type = other DNA
ctctaactgctatggtatct

SEQ ID NO: 557 - DNA, 20 bp, synthetic construct
  misc_feature 1..20: note = Synthetic oligonucleotide
  source 1..20: mol_type = other DNA
gcttcggtattaaggtatat

SEQ ID NO: 558 - DNA, 20 bp, synthetic construct
  misc_feature 1..20: note = Synthetic oligonucleotide
  source 1..20: mol_type = other DNA
taaataagatatgagacagc

SEQ ID NO: 559 - DNA, 20 bp, synthetic construct
  misc_feature 1..20: note = Synthetic oligonucleotide
  source 1..20: mol_type = other DNA
gaataatctttcctctgagc

SEQ ID NO: 560 - DNA, 20 bp, synthetic construct
  misc_feature 1..20: note = Synthetic oligonucleotide
  source 1..20: mol_type = other DNA
ccttgcccagccctgtagag

SEQ ID NO: 561 - DNA, 20 bp, synthetic construct
  misc_feature 1..20: note = Synthetic oligonucleotide
  source 1..20: mol_type = other DNA
cgtcactggtgtacttctgc

SEQ ID NO: 562 - DNA, 20 bp, synthetic construct
  misc_feature 1..20: note = Synthetic oligonucleotide
  source 1..20: mol_type = other DNA
cagcatctgtccaccgaaag

SEQ ID NO: 563 - DNA, 20 bp, synthetic construct
  misc_feature 1..20: note = Synthetic oligonucleotide
  source 1..20: mol_type = other DNA
tccactgggcttgcttccac

SEQ ID NO: 564 - DNA, 20 bp, synthetic construct
  misc_feature 1..20: note = Synthetic oligonucleotide
  source 1..20: mol_type = other DNA
gggagagtaactagaaaggc

SEQ ID NO: 565 - DNA, 20 bp, synthetic construct
  misc_feature 1..20: note = Synthetic oligonucleotide
  source 1..20: mol_type = other DNA
tctgggaggatgaggtggga

SEQ ID NO: 566 - DNA, 20 bp, synthetic construct
  misc_feature 1..20: note = Synthetic oligonucleotide
  source 1..20: mol_type = other DNA
agcagggcacggtggtgcac

SEQ ID NO: 567 - DNA, 20 bp, synthetic construct
  misc_feature 1..20: note = Synthetic oligonucleotide
  source 1..20: mol_type = other DNA
gatgaccagtgacaatgaag

SEQ ID NO: 568 - DNA, 20 bp, synthetic construct
  misc_feature 1..20: note = Synthetic oligonucleotide
  source 1..20: mol_type = other DNA
gagaagaaaataggtgccca

SEQ ID NO: 569 - DNA, 20 bp, synthetic construct
  misc_feature 1..20: note = Synthetic oligonucleotide
  source 1..20: mol_type = other DNA
tatcatgactgcaacagact

SEQ ID NO: 570 - DNA, 20 bp, synthetic construct
  misc_feature 1..20: note = Synthetic oligonucleotide
  source 1..20: mol_type = other DNA
gctagtcctccaggtgattc

SEQ ID NO: 571 - DNA, 20 bp, synthetic construct
  misc_feature 1..20: note = Synthetic oligonucleotide
  source 1..20: mol_type = other DNA
ggcaggatcaggttgacacc

SEQ ID NO: 572 - DNA, 20 bp, synthetic construct
  misc_feature 1..20: note = Synthetic oligonucleotide
  source 1..20: mol_type = other DNA
gacccaaatccaaaatatgg

SEQ ID NO: 573 - DNA, 20 bp, synthetic construct
  misc_feature 1..20: note = Synthetic oligonucleotide
  source 1..20: mol_type = other DNA
atgataagatgtggccgggc

SEQ ID NO: 574 - DNA, 20 bp, synthetic construct
  misc_feature 1..20: note = Synthetic oligonucleotide
  source 1..20: mol_type = other DNA
gatgtggccgggcatggtgg

SEQ ID NO: 575 - DNA, 20 bp, synthetic construct
  misc_feature 1..20: note = Synthetic oligonucleotide
  source 1..20: mol_type = other DNA
ttagggatgggtgcagggct

SEQ ID NO: 576 - DNA, 20 bp, synthetic construct
  misc_feature 1..20: note = Synthetic oligonucleotide
  source 1..20: mol_type = other DNA
aagcaagggacactgacaca

SEQ ID NO: 577 - DNA, 20 bp, synthetic construct
  misc_feature 1..20: note = Synthetic oligonucleotide
  source 1..20: mol_type = other DNA
gcactttgcagataccactt

SEQ ID NO: 578 - DNA, 20 bp, synthetic construct
  misc_feature 1..20: note = Synthetic oligonucleotide
  source 1..20: mol_type = other DNA
ggcaactctgtgttggttcc

SEQ ID NO: 579 - DNA, 20 bp, synthetic construct
  misc_feature 1..20: note = Synthetic oligonucleotide
  source 1..20: mol_type = other DNA
cagaagtgctaccccagtga

SEQ ID NO: 580 - DNA, 20 bp, synthetic construct
  misc_feature 1..20: note = Synthetic oligonucleotide
  source 1..20: mol_type = other DNA
acagcccttaagaatgatgc

SEQ ID NO: 581 - DNA, 20 bp, synthetic construct
  misc_feature 1..20: note = Synthetic oligonucleotide
  source 1..20: mol_type = other DNA
gcagcctacggatcaaggag

SEQ ID NO: 582 - DNA, 20 bp, synthetic construct
  misc_feature 1..20: note = Synthetic oligonucleotide
  source 1..20: mol_type = other DNA
caggcatcgtggcaaacacc

SEQ ID NO: 583 - DNA, 20 bp, synthetic construct
  misc_feature 1..20: note = Synthetic oligonucleotide
  source 1..20: mol_type = other DNA
gctgagacggggggatctct

SEQ ID NO: 584 - DNA, 20 bp, synthetic construct
  misc_feature 1..20: note = Synthetic oligonucleotide
  source 1..20: mol_type = other DNA
agggagggaggcaaagaggg

SEQ ID NO: 585 - DNA, 20 bp, synthetic construct
  misc_feature 1..20: note = Synthetic oligonucleotide
  source 1..20: mol_type = other DNA
ggcctagaattgaacatgca

SEQ ID NO: 586 - DNA, 20 bp, synthetic construct
  misc_feature 1..20: note = Synthetic oligonucleotide
  source 1..20: mol_type = other DNA
gaatgagctcttggaaacta

SEQ ID NO: 587 - DNA, 20 bp, synthetic construct
  misc_feature 1..20: note = Synthetic oligonucleotide
  source 1..20: mol_type = other DNA
ggagactgtccctggaggat

SEQ ID NO: 588 - DNA, 20 bp, synthetic construct
  misc_feature 1..20: note = Synthetic oligonucleotide
  source 1..20: mol_type = other DNA
tagcagactgccaaccaagc

SEQ ID NO: 589 - DNA, 20 bp, synthetic construct
  misc_feature 1..20: note = Synthetic oligonucleotide
  source 1..20: mol_type = other DNA
cagactggagccagagaggg

SEQ ID NO: 590 - DNA, 20 bp, synthetic construct
  misc_feature 1..20: note = Synthetic oligonucleotide
  source 1..20: mol_type = other DNA
ggaggaaacaatatgaactg

SEQ ID NO: 591 - DNA, 20 bp, synthetic construct
  misc_feature 1..20: note = Synthetic oligonucleotide
  source 1..20: mol_type = other DNA
gcactgagccatgaccacgc

SEQ ID NO: 592 - DNA, 20 bp, synthetic construct
  misc_feature 1..20: note = Synthetic oligonucleotide
  source 1..20: mol_type = other DNA
gggtttgaggcacggtggga

SEQ ID NO: 593 - DNA, 20 bp, synthetic construct
  misc_feature 1..20: note = Synthetic oligonucleotide
  source 1..20: mol_type = other DNA
aacaagtaggccgggcacag

SEQ ID NO: 594 - DNA, 20 bp, synthetic construct
  misc_feature 1..20: note = Synthetic oligonucleotide
  source 1..20: mol_type = other DNA
ggctgaagcaggaagatagc

SEQ ID NO: 595 - DNA, 20 bp, synthetic construct
  misc_feature 1..20: note = Synthetic oligonucleotide
  source 1..20: mol_type = other DNA
tctggaaaatgaggccaccc

SEQ ID NO: 596 - DNA, 20 bp, synthetic construct
  misc_feature 1..20: note = Synthetic oligonucleotide
  source 1..20: mol_type = other DNA
ccttctttgagctggatacc

SEQ ID NO: 597 - DNA, 20 bp, synthetic construct
  misc_feature 1..20: note = Synthetic oligonucleotide
  source 1..20: mol_type = other DNA
agtattccaagcagtttgca

SEQ ID NO: 598 - DNA, 20 bp, synthetic construct
  misc_feature 1..20: note = Synthetic oligonucleotide
  source 1..20: mol_type = other DNA
gggggattagagtgctatag

SEQ ID NO: 599 - DNA, 20 bp, synthetic construct
  misc_feature 1..20: note = Synthetic oligonucleotide
  source 1..20: mol_type = other DNA
tcttgcccacgtgatgcctt

SEQ ID NO: 600 - DNA, 20 bp, synthetic construct
  misc_feature 1..20: note = Synthetic oligonucleotide
  source 1..20: mol_type = other DNA
gggagactgacctcactact

SEQ ID NO: 601 - DNA, 20 bp, synthetic construct
  misc_feature 1..20: note = Synthetic oligonucleotide
  source 1..20: mol_type = other DNA
gagaatgaagcctgaggact

SEQ ID NO: 602 - DNA, 20 bp, synthetic construct
  misc_feature 1..20: note = Synthetic oligonucleotide
  source 1..20: mol_type = other DNA
gcagtactggggcatggatc

SEQ ID NO: 603 - DNA, 20 bp, synthetic construct
  misc_feature 1..20: note = Synthetic oligonucleotide
  source 1..20: mol_type = other DNA
cttaatttctctgtgcctgt

SEQ ID NO: 604 - DNA, 20 bp, synthetic construct
  misc_feature 1..20: note = Synthetic oligonucleotide
  source 1..20: mol_type = other DNA
tagaagaacagtgtggggcc

SEQ ID NO: 605 - DNA, 20 bp, synthetic construct
  misc_feature 1..20: note = Synthetic oligonucleotide
  source 1..20: mol_type = other DNA
aagagaatggtggtcccaga

SEQ ID NO: 606 - DNA, 20 bp, synthetic construct
  misc_feature 1..20: note = Synthetic oligonucleotide
  source 1..20: mol_type = other DNA
caagagagagtagattagga

SEQ ID NO: 607 - DNA, 20 bp, synthetic construct
  misc_feature 1..20: note = Synthetic oligonucleotide
  source 1..20: mol_type = other DNA
ccaaggccaggtgcagtagc

SEQ ID NO: 608 - DNA, 20 bp, synthetic construct
  misc_feature 1..20: note = Synthetic oligonucleotide
  source 1..20: mol_type = other DNA
tattatctgcggcaatatgg

SEQ ID NO: 609 - DNA, 20 bp, synthetic construct
  misc_feature 1..20: note = Synthetic oligonucleotide
  source 1..20: mol_type = other DNA
ttacaagaggctgggacgtg

SEQ ID NO: 610 - DNA, 20 bp, synthetic construct
  misc_feature 1..20: note = Synthetic oligonucleotide
  source 1..20: mol_type = other DNA
atcctccctaccaaaaaacc

SEQ ID NO: 611 - DNA, 20 bp, synthetic construct
  misc_feature 1..20: note = Synthetic oligonucleotide
  source 1..20: mol_type = other DNA
acacatccctggcttttccc

SEQ ID NO: 612 - DNA, 20 bp, synthetic construct
  misc_feature 1..20: note = Synthetic oligonucleotide
  source 1..20: mol_type = other DNA
ctccgtcctttccacttctc

SEQ ID NO: 613 - DNA, 20 bp, synthetic construct
  misc_feature 1..20: note = Synthetic oligonucleotide
  source 1..20: mol_type = other DNA
gtgttctgacagaaaatggg

SEQ ID NO: 614 - DNA, 20 bp, synthetic construct
  misc_feature 1..20: note = Synthetic oligonucleotide
  source 1..20: mol_type = other DNA
tacacaaccccttacgtgaa

SEQ ID NO: 615 - DNA, 20 bp, synthetic construct
  misc_feature 1..20: note = Synthetic oligonucleotide
  source 1..20: mol_type = other DNA
cagggagcagtacagcttgg

SEQ ID NO: 616 - DNA, 20 bp, synthetic construct
  misc_feature 1..20: note = Synthetic oligonucleotide
  source 1..20: mol_type = other DNA
gccagaagaaagcaagaagt

SEQ ID NO: 617 - DNA, 20 bp, synthetic construct
  misc_feature 1..20: note = Synthetic oligonucleotide
  source 1..20: mol_type = other DNA
agcaaggagtaaccaaatag

SEQ ID NO: 618 - DNA, 20 bp, synthetic construct
  misc_feature 1..20: note = Synthetic oligonucleotide
  source 1..20: mol_type = other DNA
ggggcaaccaggtaggtaac

SEQ ID NO: 619 - DNA, 20 bp, synthetic construct
  misc_feature 1..20: note = Synthetic oligonucleotide
  source 1..20: mol_type = other DNA
tgatgaataggaagtacaca

SEQ ID NO: 620 - DNA, 20 bp, synthetic construct
  misc_feature 1..20: note = Synthetic oligonucleotide
  source 1..20: mol_type = other DNA
acatttaagtgggggagggc

SEQ ID NO: 621 - DNA, 20 bp, synthetic construct
  misc_feature 1..20: note = Synthetic oligonucleotide
  source 1..20: mol_type = other DNA
gggggagggctgttatagaa

SEQ ID NO: 622 - DNA, 20 bp, synthetic construct
  misc_feature 1..20: note = Synthetic oligonucleotide
  source 1..20: mol_type = other DNA
tctgggcccaaactaagtgg

SEQ ID NO: 623 - DNA, 20 bp, synthetic construct
  misc_feature 1..20: note = Synthetic oligonucleotide
  source 1..20: mol_type = other DNA
tttgtctgctgttcatgatg

SEQ ID NO: 624 - DNA, 20 bp, synthetic construct
  misc_feature 1..20: note = Synthetic oligonucleotide
  source 1..20: mol_type = other DNA
ttgtctgctgttcatgatga

SEQ ID NO: 625 - DNA, 20 bp, synthetic construct
  misc_feature 1..20: note = Synthetic oligonucleotide
  source 1..20: mol_type = other DNA
gacaagacgccacagtggaa

SEQ ID NO: 626 - DNA, 20 bp, synthetic construct
  misc_feature 1..20: note = Synthetic oligonucleotide
  source 1..20: mol_type = other DNA
ggctagactagtgcagtggc

SEQ ID NO: 627 - DNA, 20 bp, synthetic construct
  misc_feature 1..20: note = Synthetic oligonucleotide
  source 1..20: mol_type = other DNA
cctcccgccatgggcctccc

SEQ ID NO: 628 - DNA, 20 bp, synthetic construct
  misc_feature 1..20: note = Synthetic oligonucleotide
  source 1..20: mol_type = other DNA
gtgaagacaagggaaggggg

SEQ ID NO: 629 - DNA, 20 bp, synthetic construct
  misc_feature 1..20: note = Synthetic oligonucleotide
  source 1..20: mol_type = other DNA
gcctcttagggactgagcta

SEQ ID NO: 630 - DNA, 20 bp, synthetic construct
  misc_feature 1..20: note = Synthetic oligonucleotide
  source 1..20: mol_type = other DNA
agtctactcaaaaacctggg

SEQ ID NO: 631 - DNA, 20 bp, synthetic construct
  misc_feature 1..20: note = Synthetic oligonucleotide
  source 1..20: mol_type = other DNA
aggccaaggtgggaggatac

SEQ ID NO: 632 - DNA, 20 bp, synthetic construct
  misc_feature 1..20: note = Synthetic oligonucleotide
  source 1..20: mol_type = other DNA
gcacatgactctgcaacccc

SEQ ID NO: 633 - DNA, 20 bp, synthetic construct
  misc_feature 1..20: note = Synthetic oligonucleotide
  source 1..20: mol_type = other DNA
gcccaggaggttgacagtgt

SEQ ID NO: 634 - DNA, 20 bp, synthetic construct
  misc_feature 1..20: note = Synthetic oligonucleotide
  source 1..20: mol_type = other DNA
acgggtgaggaggagttagg

SEQ ID NO: 635 - DNA, 20 bp, synthetic construct
  misc_feature 1..20: note = Synthetic oligonucleotide
  source 1..20: mol_type = other DNA
tttgggtgatggaagtgttc

SEQ ID NO: 636 - DNA, 20 bp, synthetic construct
  misc_feature 1..20: note = Synthetic oligonucleotide
  source 1..20: mol_type = other DNA
gctctatctcgtaagattgc

SEQ ID NO: 637 - DNA, 20 bp, synthetic construct
  misc_feature 1..20: note = Synthetic oligonucleotide
  source 1..20: mol_type = other DNA
acctgtttcctattgtcgct

SEQ ID NO: 638 - DNA, 20 bp, synthetic construct
  misc_feature 1..20: note = Synthetic oligonucleotide
  source 1..20: mol_type = other DNA
caggggaaaagacagatacg

SEQ ID NO: 639 - DNA, 20 bp, synthetic construct
  misc_feature 1..20: note = Synthetic oligonucleotide
  source 1..20: mol_type = other DNA
gagacctgcattagcaagag

SEQ ID NO: 640 - DNA, 20 bp, synthetic construct
  misc_feature 1..20: note = Synthetic oligonucleotide
  source 1..20: mol_type = other DNA
gggctctttgctatcctacc

SEQ ID NO: 641 - DNA, 20 bp, synthetic construct
  misc_feature 1..20: note = Synthetic oligonucleotide
  source 1..20: mol_type = other DNA
taagactccttttcagtaac

SEQ ID NO: 642 - DNA, 20 bp, synthetic construct
  misc_feature 1..20: note = Synthetic oligonucleotide
  source 1..20: mol_type = other DNA
aacattaaggtcgctcggtc

SEQ ID NO: 643 - DNA, 20 bp, synthetic construct
  misc_feature 1..20: note = Synthetic oligonucleotide
  source 1..20: mol_type = other DNA
caactggtcacggggaggag

SEQ ID NO: 644 - DNA, 20 bp, synthetic construct
  misc_feature 1..20: note = Synthetic oligonucleotide
  source 1..20: mol_type = other DNA
tcgcgcgtggctgggggcag

SEQ ID NO: 645 - DNA, 20 bp, synthetic construct
  misc_feature 1..20: note = Synthetic oligonucleotide
  source 1..20: mol_type = other DNA
aaccgacgggaggaggggga

SEQ ID NO: 646 - DNA, 20 bp, synthetic construct
  misc_feature 1..20: note = Synthetic oligonucleotide
  source 1..20: mol_type = other DNA
agcgccctacctgaacccgc

SEQ ID NO: 647 - DNA, 20 bp, synthetic construct
  misc_feature 1..20: note = Synthetic oligonucleotide
  source 1..20: mol_type = other DNA
gggcgcgcccagcccggtcc

SEQ ID NO: 648 - DNA, 20 bp, synthetic construct
  misc_feature 1..20: note = Synthetic oligonucleotide
  source 1..20: mol_type = other DNA
gatgctcaccgatactgata

SEQ ID NO: 649 - DNA, 20 bp, synthetic construct
  misc_feature 1..20: note = Synthetic oligonucleotide
  source 1..20: mol_type = other DNA
ctccctcgtctttcacagtc

SEQ ID NO: 650 - DNA, 20 bp, synthetic construct
  misc_feature 1..20: note = Synthetic oligonucleotide
  source 1..20: mol_type = other DNA
ctggcttggatcaaactctg

SEQ ID NO: 651 - DNA, 20 bp, synthetic construct
  misc_feature 1..20: note = Synthetic oligonucleotide
  source 1..20: mol_type = other DNA
gacatcaatgatcttacctg

SEQ ID NO: 652 - DNA, 20 bp, synthetic construct
  misc_feature 1..20: note = Synthetic oligonucleotide
  source 1..20: mol_type = other DNA
gatgaagtcacagaactatc

SEQ ID NO: 653 - DNA, 20 bp, synthetic construct
  misc_feature 1..20: note = Synthetic oligonucleotide
  source 1..20: mol_type = other DNA
ggaagaactgtctcctccag

SEQ ID NO: 654 - DNA, 20 bp, synthetic construct
  misc_feature 1..20: note = Synthetic oligonucleotide
  source 1..20: mol_type = other DNA
cctctcaccgaatctgatga

SEQ ID NO: 655 - DNA, 20 bp, synthetic construct
  misc_feature 1..20: note = Synthetic oligonucleotide
  source 1..20: mol_type = other DNA
gagccaaacatcatctctcc

SEQ ID NO: 656 - DNA, 20 bp, synthetic construct
  misc_feature 1..20: note = Synthetic oligonucleotide
  source 1..20: mol_type = other DNA
caaacatcatctctccaagc

SEQ ID NO: 657 - DNA, 20 bp, synthetic construct
  misc_feature 1..20: note = Synthetic oligonucleotide
  source 1..20: mol_type = other DNA
gcacttacgtattgagactc

SEQ ID NO: 658 - DNA, 20 bp, synthetic construct
  misc_feature 1..20: note = Synthetic oligonucleotide
  source 1..20: mol_type = other DNA
tgccagtccgagcagtaaac

SEQ ID NO: 659 - DNA, 20 bp, synthetic construct
  misc_feature 1..20: note = Synthetic oligonucleotide
  source 1..20: mol_type = other DNA
gccagtccgagcagtaaaca

SEQ ID NO: 660 - DNA, 20 bp, synthetic construct
  misc_feature 1..20: note = Synthetic oligonucleotide
  source 1..20: mol_type = other DNA
atcaaaggaaccatttacct

SEQ ID NO: 661 - DNA, 20 bp, synthetic construct
  misc_feature 1..20: note = Synthetic oligonucleotide
  source 1..20: mol_type = other DNA
gttattatcagcctttaatg

SEQ ID NO: 662 - DNA, 20 bp, synthetic construct
  misc_feature 1..20: note = Synthetic oligonucleotide
  source 1..20: mol_type = other DNA
atcttgtagcctatggaggg

SEQ ID NO: 663 - DNA, 20 bp, synthetic construct
  misc_feature 1..20: note = Synthetic oligonucleotide
  source 1..20: mol_type = other DNA
gatcaggcggagcggaccct

SEQ ID NO: 664 - DNA, 20 bp, synthetic construct
  misc_feature 1..20: note = Synthetic oligonucleotide
  source 1..20: mol_type = other DNA
accgtgctatgccactgtct

SEQ ID NO: 665 - DNA, 20 bp, synthetic construct
  misc_feature 1..20: note = Synthetic oligonucleotide
  source 1..20: mol_type = other DNA
taccatctaggaaatacccc

SEQ ID NO: 666 - DNA, 20 bp, synthetic construct
  misc_feature 1..20: note = Synthetic oligonucleotide
  source 1..20: mol_type = other DNA
gcgtcgccaacgtcgctggt

SEQ ID NO: 667 - DNA, 20 bp, synthetic construct
  misc_feature 1..20: note = Synthetic oligonucleotide
  source 1..20: mol_type = other DNA
ctggtagctgctggcacaac

SEQ ID NO: 668 - DNA, 20 bp, synthetic construct
  misc_feature 1..20: note = Synthetic oligonucleotide
  source 1..20: mol_type = other DNA
tggagtgatcagcaagctgc

SEQ ID NO: 669 - DNA, 20 bp, synthetic construct
  misc_feature 1..20: note = Synthetic oligonucleotide
  source 1..20: mol_type = other DNA
gttcatgtggctttcaaaga

SEQ ID NO: 670 - DNA, 20 bp, synthetic construct
  misc_feature 1..20: note = Synthetic oligonucleotide
  source 1..20: mol_type = other DNA
ggttagggccacagctttca

SEQ ID NO: 671 - DNA, 20 bp, synthetic construct
  misc_feature 1..20: note = Synthetic oligonucleotide
  source 1..20: mol_type = other DNA
aaagctgggcaatatgtacc

SEQ ID NO: 672 - DNA, 20 bp, synthetic construct
  misc_feature 1..20: note = Synthetic oligonucleotide
  source 1..20: mol_type = other DNA
tctctgactggcatcagctg

SEQ ID NO: 673 - DNA, 20 bp, synthetic construct
  misc_feature 1..20: note = Synthetic oligonucleotide
  source 1..20: mol_type = other DNA
gaaacgatagcaaaggtggt

SEQ ID NO: 674 - DNA, 20 bp, synthetic construct
  misc_feature 1..20: note = Synthetic oligonucleotide
  source 1..20: mol_type = other DNA
atcattgtaagccagacagg

SEQ ID NO: 675 - DNA, 20 bp, synthetic construct
  misc_feature 1..20: note = Synthetic oligonucleotide
  source 1..20: mol_type = other DNA
tcgtggcatcgtgtaaagat

SEQ ID NO: 676 - DNA, 20 bp, synthetic construct
  misc_feature 1..20: note = Synthetic oligonucleotide
  source 1..20: mol_type = other DNA
gtaaagattacaaattgttg

SEQ ID NO: 677 - DNA, 20 bp, synthetic construct
  misc_feature 1..20: note = Synthetic oligonucleotide
  source 1..20: mol_type = other DNA
agtgggttatatggatgagt

SEQ ID NO: 678 - DNA, 20 bp, synthetic construct
  misc_feature 1..20: note = Synthetic oligonucleotide
  source 1..20: mol_type = other DNA
ccacactctgagaggaatgc

SEQ ID NO: 679 - DNA, 20 bp, synthetic construct
  misc_feature 1..20: note = Synthetic oligonucleotide
  source 1..20: mol_type = other DNA
ctgagaggaatgcttttcta

SEQ ID NO: 680 - DNA, 20 bp, synthetic construct
  misc_feature 1..20: note = Synthetic oligonucleotide
  source 1..20: mol_type = other DNA
gaaaacttcctacttaccca

SEQ ID NO: 681 - DNA, 20 bp, synthetic construct
  misc_feature 1..20: note = Synthetic oligonucleotide
  source 1..20: mol_type = other DNA
caatcttcttgctctcctcc

SEQ ID NO: 682 - DNA, 20 bp, synthetic construct
  misc_feature 1..20: note = Synthetic oligonucleotide
  source 1..20: mol_type = other DNA
cctccataataactgctaac

SEQ ID NO: 683 - DNA, 20 bp, synthetic construct
  misc_feature 1..20: note = Synthetic oligonucleotide
  source 1..20: mol_type = other DNA
tcatatcatgacctgtatct

SEQ ID NO: 684 - DNA, 20 bp, synthetic construct
  misc_feature 1..20: note = Synthetic oligonucleotide
  source 1..20: mol_type = other DNA
ctatccccaagggcactgtc

SEQ ID NO: 685 - DNA, 20 bp, synthetic construct
  misc_feature 1..20: note = Synthetic oligonucleotide
  source 1..20: mol_type = other DNA
gttattttttgtacacaata

SEQ ID NO: 686 - DNA, 20 bp, synthetic construct
  misc_feature 1..20: note = Synthetic oligonucleotide
  source 1..20: mol_type = other DNA
ttttgtacacaatatttttg

SEQ ID NO: 687 - DNA, 20 bp, synthetic construct
  misc_feature 1..20: note = Synthetic oligonucleotide
  source 1..20: mol_type = other DNA
ggaacatcatcaatagtcct

SEQ ID NO: 688 - DNA, 20 bp, synthetic construct
  misc_feature 1..20: note = Synthetic oligonucleotide
  source 1..20: mol_type = other DNA
caatagtcctggtttcgatt

SEQ ID NO: 689 - DNA, 20 bp, synthetic construct
  misc_feature 1..20: note = Synthetic oligonucleotide
  source 1..20: mol_type = other DNA
ttcgtcgaataagctcatgc

SEQ ID NO: 690 - DNA, 20 bp, synthetic construct
  misc_feature 1..20: note = Synthetic oligonucleotide
  source 1..20: mol_type = other DNA
cagggaagttcacagggctc

SEQ ID NO: 691 - DNA, 20 bp, synthetic construct
  misc_feature 1..20: note = Synthetic oligonucleotide
  source 1..20: mol_type = other DNA
ggctcttcagaaaccatgtt

SEQ ID NO: 692 - DNA, 20 bp, synthetic construct
  misc_feature 1..20: note = Synthetic oligonucleotide
  source 1..20: mol_type = other DNA
ggtccttggttgtttgttta

SEQ ID NO: 693 - DNA, 20 bp, synthetic construct
  misc_feature 1..20: note = Synthetic oligonucleotide
  source 1..20: mol_type = other DNA
ggtttggtgtgatgtctggt

SEQ ID NO: 694 - DNA, 20 bp, synthetic construct
  misc_feature 1..20: note = Synthetic oligonucleotide
  source 1..20: mol_type = other DNA
gatccaccactgcctgactt

SEQ ID NO: 695 - DNA, 20 bp, synthetic construct
  misc_feature 1..20: note = Synthetic oligonucleotide
  source 1..20: mol_type = other DNA
ctgcctgacttcgaagctca

SEQ ID NO: 696 - DNA, 20 bp, synthetic construct
  misc_feature 1..20: note = Synthetic oligonucleotide
  source 1..20: mol_type = other DNA
tcaggtgacatagaatcccc

SEQ ID NO: 697 - DNA, 20 bp, synthetic construct
  misc_feature 1..20: note = Synthetic oligonucleotide
  source 1..20: mol_type = other DNA
ggaaagtaacctttgtctgg

SEQ ID NO: 698 - DNA, 20 bp, synthetic construct
  misc_feature 1..20: note = Synthetic oligonucleotide
  source 1..20: mol_type = other DNA
gtggatctcattgctttgcc

SEQ ID NO: 699 - DNA, 20 bp, synthetic construct
  misc_feature 1..20: note = Synthetic oligonucleotide
  source 1..20: mol_type = other DNA
ccagcaacttctcactctgc

SEQ ID NO: 700 - DNA, 20 bp, synthetic construct
  misc_feature 1..20: note = Synthetic oligonucleotide
  source 1..20: mol_type = other DNA
ttgtctactggaacagatcc

SEQ ID NO: 701 - DNA, 20 bp, synthetic construct
  misc_feature 1..20: note = Synthetic oligonucleotide
  source 1..20: mol_type = other DNA
ctctaacttggcgtcaaagc

SEQ ID NO: 702 - DNA, 20 bp, synthetic construct
  misc_feature 1..20: note = Synthetic oligonucleotide
  source 1..20: mol_type = other DNA
tctctgtactgtttaacatc

SEQ ID NO: 703 - DNA, 20 bp, synthetic construct
  misc_feature 1..20: note = Synthetic oligonucleotide
  source 1..20: mol_type = other DNA
cttggcagtcagaaggagaa

SEQ ID NO: 704 - DNA, 20 bp, synthetic construct
  misc_feature 1..20: note = Synthetic oligonucleotide
  source 1..20: mol_type = other DNA
cactcatctgaaattcctag

SEQ ID NO: 705 - DNA, 20 bp, synthetic construct
  misc_feature 1..20: note = Synthetic oligonucleotide
  source 1..20: mol_type = other DNA
acagttacaattgggagttc

SEQ ID NO: 706 - DNA, 20 bp, synthetic construct
  misc_feature 1..20: note = Synthetic oligonucleotide
  source 1..20: mol_type = other DNA
ctctttaaagagcaaactgc

SEQ ID NO: 707 - DNA, 20 bp, synthetic construct
  misc_feature 1..20: note = Synthetic oligonucleotide
  source 1..20: mol_type = other DNA
gcattgtgacaaggacatac

SEQ ID NO: 708 - DNA, 20 bp, synthetic construct
  misc_feature 1..20: note = Synthetic oligonucleotide
  source 1..20: mol_type = other DNA
tcacctttctctaaagtggt

SEQ ID NO: 709 - DNA, 20 bp, synthetic construct
  misc_feature 1..20: note = Synthetic oligonucleotide
  source 1..20: mol_type = other DNA
agtaattactgtgcctggca

SEQ ID NO: 710 - DNA, 20 bp, synthetic construct
  misc_feature 1..20: note = Synthetic oligonucleotide
  source 1..20: mol_type = other DNA
agtccttgctaaccgtacgg

SEQ ID NO: 711 - DNA, 20 bp, synthetic construct
  misc_feature 1..20: note = Synthetic oligonucleotide
  source 1..20: mol_type = other DNA
gcgccatacaagtctcctgt

SEQ ID NO: 712 - DNA, 20 bp, synthetic construct
  misc_feature 1..20: note = Synthetic oligonucleotide
  source 1..20: mol_type = other DNA
ggtcactcacctgcacagca

SEQ ID NO: 713 - DNA, 20 bp, synthetic construct
  misc_feature 1..20: note = Synthetic oligonucleotide
  source 1..20: mol_type = other DNA
agtcaggcacataagatgag

SEQ ID NO: 714 - DNA, 20 bp, synthetic construct
  misc_feature 1..20: note = Synthetic oligonucleotide
  source 1..20: mol_type = other DNA
agccacccagcaaggacctc

SEQ ID NO: 715 - DNA, 20 bp, synthetic construct
  misc_feature 1..20: note = Synthetic oligonucleotide
  source 1..20: mol_type = other DNA
gctgaagtgtggaatgaagc

SEQ ID NO: 716 - DNA, 20 bp, synthetic construct
  misc_feature 1..20: note = Synthetic oligonucleotide
  source 1..20: mol_type = other DNA
gtggaatgaagcagattgga

SEQ ID NO: 717 - DNA, 20 bp, synthetic construct
  misc_feature 1..20: note = Synthetic oligonucleotide
  source 1..20: mol_type = other DNA
actcgtctctggctactggc

SEQ ID NO: 718 - DNA, 20 bp, synthetic construct
  misc_feature 1..20: note = Synthetic oligonucleotide
  source 1..20: mol_type = other DNA
acagtccatttatccatgtc

SEQ ID NO: 719 - DNA, 20 bp, synthetic construct
  misc_feature 1..20: note = Synthetic oligonucleotide
  source 1..20: mol_type = other DNA
gacatgaacacgcatctgcc

SEQ ID NO: 720 - DNA, 20 bp, synthetic construct
  misc_feature 1..20: note = Synthetic oligonucleotide
  source 1..20: mol_type = other DNA
tcaggtattcagacagcatt

SEQ ID NO: 721 - DNA, 20 bp, synthetic construct
  misc_feature 1..20: note = Synthetic oligonucleotide
  source 1..20: mol_type = other DNA
gctcctgcaaccggtcttca

SEQ ID NO: 722 - DNA, 20 bp, synthetic construct
  misc_feature 1..20: note = Synthetic oligonucleotide
  source 1..20: mol_type = other DNA
gcaaccggtcttcaagatgc

SEQ ID NO: 723 - DNA, 20 bp, synthetic construct
  misc_feature 1..20: note = Synthetic oligonucleotide
  source 1..20: mol_type = other DNA
ccctagaactgggaggttat

SEQ ID NO: 724 - DNA, 20 bp, synthetic construct
  misc_feature 1..20: note = Synthetic oligonucleotide
  source 1..20: mol_type = other DNA
gtatacagaacaagaaacag

SEQ ID NO: 725 - DNA, 20 bp, synthetic construct
  misc_feature 1..20: note = Synthetic oligonucleotide
  source 1..20: mol_type = other DNA
acatatccaacatctaagta

SEQ ID NO: 726 - DNA, 20 bp, synthetic construct
  misc_feature 1..20: note = Synthetic oligonucleotide
  source 1..20: mol_type = other DNA
gacatctaccagaagtaggc

SEQ ID NO: 727 - DNA, 20 bp, synthetic construct
  misc_feature 1..20: note = Synthetic oligonucleotide
  source 1..20: mol_type = other DNA
tttaagtgatcatccccaga

SEQ ID NO: 728 - DNA, 20 bp, synthetic construct
  misc_feature 1..20: note = Synthetic oligonucleotide
  source 1..20: mol_type = other DNA
ataaaagccagaaatattta

SEQ ID NO: 729 - DNA, 20 bp, synthetic construct
  misc_feature 1..20: note = Synthetic oligonucleotide
  source 1..20: mol_type = other DNA
tctataatgtaaaagatccc

SEQ ID NO: 730 - DNA, 20 bp, synthetic construct
  misc_feature 1..20: note = Synthetic oligonucleotide
  source 1..20: mol_type = other DNA
gtaacaactgtctgtaccat

SEQ ID NO: 731 - DNA, 20 bp, synthetic construct
  misc_feature 1..20: note = Synthetic oligonucleotide
  source 1..20: mol_type = other DNA
caactgtctgtaccataact

SEQ ID NO: 732 - DNA, 20 bp, synthetic construct
  misc_feature 1..20: note = Synthetic oligonucleotide
  source 1..20: mol_type = other DNA
cttttcacattcatcataat

SEQ ID NO: 733 - DNA, 20 bp, synthetic construct
  misc_feature 1..20: note = Synthetic oligonucleotide
  source 1..20: mol_type = other DNA
cattccttgggctttgcgta

SEQ ID NO: 734 - DNA, 20 bp, synthetic construct
  misc_feature 1..20: note = Synthetic oligonucleotide
  source 1..20: mol_type = other DNA
aagaatgactatggtgaagg

SEQ ID NO: 735 - DNA, 20 bp, synthetic construct
  misc_feature 1..20: note = Synthetic oligonucleotide
  source 1..20: mol_type = other DNA
gaatgactatggtgaaggta

SEQ ID NO: 736 - DNA, 20 bp, synthetic construct
  misc_feature 1..20: note = Synthetic oligonucleotide
  source 1..20: mol_type = other DNA
gaaggattaggaattacaaa

SEQ ID NO: 737 - DNA, 20 bp, synthetic construct
  misc_feature 1..20: note = Synthetic oligonucleotide
  source 1..20: mol_type = other DNA
ggggaggaacaaaacagtaa

SEQ ID NO: 738 - DNA, 20 bp, synthetic construct
  misc_feature 1..20: note = Synthetic oligonucleotide
  source 1..20: mol_type = other DNA
ccttcccagcaaagcttagc

SEQ ID NO: 739 - DNA, 20 bp, synthetic construct
  misc_feature 1..20: note = Synthetic oligonucleotide
  source 1..20: mol_type = other DNA
gctttaggaacaacaatagc

SEQ ID NO: 740 - DNA, 20 bp, synthetic construct
  misc_feature 1..20: note = Synthetic oligonucleotide
  source 1..20: mol_type = other DNA
aggaacaacaatagcatgag

SEQ ID NO: 741 - DNA, 20 bp, synthetic construct
  misc_feature 1..20: note = Synthetic oligonucleotide
  source 1..20: mol_type = other DNA
ggactagaatttctaaacgg

SEQ ID NO: 742 - DNA, 20 bp, synthetic construct
  misc_feature 1..20: note = Synthetic oligonucleotide
  source 1..20: mol_type = other DNA
ctaaacggtaattaaacatt

SEQ ID NO: 743 - DNA, 20 bp, synthetic construct
  misc_feature 1..20: note = Synthetic oligonucleotide
  source 1..20: mol_type = other DNA
ggttaaggagacacccagac

SEQ ID NO: 744 - DNA, 20 bp, synthetic construct
  misc_feature 1..20: note = Synthetic oligonucleotide
  source 1..20: mol_type = other DNA
ttccaaaatcagacaactgg

SEQ ID NO: 745 - DNA, 20 bp, synthetic construct
  misc_feature 1..20: note = Synthetic oligonucleotide
  source 1..20: mol_type = other DNA
caaaatcagacaactggata

SEQ ID NO: 746 - DNA, 20 bp, synthetic construct
  misc_feature 1..20: note = Synthetic oligonucleotide
  source 1..20: mol_type = other DNA
aggtaataactgggactagg

SEQ ID NO: 747 - DNA, 20 bp, synthetic construct
  misc_feature 1..20: note = Synthetic oligonucleotide
  source 1..20: mol_type = other DNA
gggccaaacagattgcagac

SEQ ID NO: 748 - DNA, 20 bp, synthetic construct
  misc_feature 1..20: note = Synthetic oligonucleotide
  source 1..20: mol_type = other DNA
caatttcaggtttacattcc

SEQ ID NO: 749 - DNA, 20 bp, synthetic construct
  misc_feature 1..20: note = Synthetic oligonucleotide
  source 1..20: mol_type = other DNA
acagcaaggcaaaatgtgac

SEQ ID NO: 750 - DNA, 20 bp, synthetic construct
  misc_feature 1..20: note = Synthetic oligonucleotide
  source 1..20: mol_type = other DNA
caaggtcaaagacaactttc

SEQ ID NO: 751 - DNA, 20 bp, synthetic construct
  misc_feature 1..20: note = Synthetic oligonucleotide
  source 1..20: mol_type = other DNA
aaacagcaagaatggatgtg

SEQ ID NO: 752 - DNA, 20 bp, synthetic construct
  misc_feature 1..20: note = Synthetic oligonucleotide
  source 1..20: mol_type = other DNA
gaataaacaagtggttttct

SEQ ID NO: 753 - DNA, 20 bp, synthetic construct
  misc_feature 1..20: note = Synthetic oligonucleotide
  source 1..20: mol_type = other DNA
gtcaatgaaagcagaaacca

SEQ ID NO: 754 - DNA, 20 bp, synthetic construct
  misc_feature 1..20: note = Synthetic oligonucleotide
  source 1..20: mol_type = other DNA
accaactttactactagcat

SEQ ID NO: 755 - DNA, 20 bp, synthetic construct
  misc_feature 1..20: note = Synthetic oligonucleotide
  source 1..20: mol_type = other DNA
gaccagataagcaaagaata

SEQ ID NO: 756 - DNA, 20 bp, synthetic construct
  misc_feature 1..20: note = Synthetic oligonucleotide
  source 1..20: mol_type = other DNA
gtagtactcaagtaaactga

SEQ ID NO: 757 - DNA, 20 bp, synthetic construct
  misc_feature 1..20: note = Synthetic oligonucleotide
  source 1..20: mol_type = other DNA
gaggtagtagaaagtattga

SEQ ID NO: 758 - DNA, 20 bp, synthetic construct
  misc_feature 1..20: note = Synthetic oligonucleotide
  source 1..20: mol_type = other DNA
atttacattacttacaagag

SEQ ID NO: 759 - DNA, 20 bp, synthetic construct
  misc_feature 1..20: note = Synthetic oligonucleotide
  source 1..20: mol_type = other DNA
tacaagcaacactctatagt

SEQ ID NO: 760 - DNA, 20 bp, synthetic construct
  misc_feature 1..20: note = Synthetic oligonucleotide
  source 1..20: mol_type = other DNA
taagagttatgaatagtgta

SEQ ID NO: 761 - DNA, 20 bp, synthetic construct
  misc_feature 1..20: note = Synthetic oligonucleotide
  source 1..20: mol_type = other DNA
aagagttatgaatagtgtaa

SEQ ID NO: 762 - DNA, 20 bp, synthetic construct
  misc_feature 1..20: note = Synthetic oligonucleotide
  source 1..20: mol_type = other DNA
tgaggattattaagcagtga

SEQ ID NO: 763 - DNA, 20 bp, synthetic construct
  misc_feature 1..20: note = Synthetic oligonucleotide
  source 1..20: mol_type = other DNA
gggccttggctacctgagca

SEQ ID NO: 764 - DNA, 20 bp, synthetic construct
  misc_feature 1..20: note = Synthetic oligonucleotide
  source 1..20: mol_type = other DNA
gccgatgctttggtgcaatt

SEQ ID NO: 765 - DNA, 20 bp, synthetic construct
  misc_feature 1..20: note = Synthetic oligonucleotide
  source 1..20: mol_type = other DNA
catttatgttaaattagtga

SEQ ID NO: 766 - DNA, 20 bp, synthetic construct
  misc_feature 1..20: note = Synthetic oligonucleotide
  source 1..20: mol_type = other DNA
gaatatgtaaatattaatat

SEQ ID NO: 767 - DNA, 20 bp, synthetic construct
  misc_feature 1..20: note = Synthetic oligonucleotide
  source 1..20: mol_type = other DNA
ttataagaacagttcatact

SEQ ID NO: 768 - DNA, 20 bp, synthetic construct
  misc_feature 1..20: note = Synthetic oligonucleotide
  source 1..20: mol_type = other DNA
agtagtattctcattttggg

SEQ ID NO: 769 - DNA, 20 bp, synthetic construct
  misc_feature 1..20: note = Synthetic oligonucleotide
  source 1..20: mol_type = other DNA
cttaaaaaaaaggttggctt

SEQ ID NO: 770 - DNA, 20 bp, synthetic construct
  misc_feature 1..20: note = Synthetic oligonucleotide
  source 1..20: mol_type = other DNA
taaaggcatgtttaccagtc

SEQ ID NO: 771 - DNA, 20 bp, synthetic construct
  misc_feature 1..20: note = Synthetic oligonucleotide
  source 1..20: mol_type = other DNA
ggcatgtttaccagtcttgt

SEQ ID NO: 772 - DNA, 20 bp, synthetic construct
  misc_feature 1..20: note = Synthetic oligonucleotide
  source 1..20: mol_type = other DNA
ggataacataacacatttac

SEQ ID NO: 773 - DNA, 20 bp, synthetic construct
  misc_feature 1..20: note = Synthetic oligonucleotide
  source 1..20: mol_type = other DNA
tcttataattaacaggctgt

SEQ ID NO: 774 - DNA, 20 bp, synthetic construct
  misc_feature 1..20: note = Synthetic oligonucleotide
  source 1..20: mol_type = other DNA
ggctgtttaaaatacttact

SEQ ID NO: 775 - DNA, 20 bp, synthetic construct
  misc_feature 1..20: note = Synthetic oligonucleotide
  source 1..20: mol_type = other DNA
gagaaataaccagacattag

SEQ ID NO: 776 - DNA, 20 bp, synthetic construct
  misc_feature 1..20: note = Synthetic oligonucleotide
  source 1..20: mol_type = other DNA
atagatctctgtaccttaga

SEQ ID NO: 777 - DNA, 20 bp, synthetic construct
  misc_feature 1..20: note = Synthetic oligonucleotide
  source 1..20: mol_type = other DNA
ctctgtaccttagaaattaa

SEQ ID NO: 778 - DNA, 20 bp, synthetic construct
  misc_feature 1..20: note = Synthetic oligonucleotide
  source 1..20: mol_type = other DNA
gagctgtgacaacactgcag

SEQ ID NO: 779 - DNA, 20 bp, synthetic construct
  misc_feature 1..20: note = Synthetic oligonucleotide
  source 1..20: mol_type = other DNA
gttgctttaatttcatttgt

SEQ ID NO: 780 - DNA, 20 bp, synthetic construct
  misc_feature 1..20: note = Synthetic oligonucleotide
  source 1..20: mol_type = other DNA
caccacccaaaagtccagtc

SEQ ID NO: 781 - DNA, 20 bp, synthetic construct
  misc_feature 1..20: note = Synthetic oligonucleotide
  source 1..20: mol_type = other DNA
gcagaataccctggtgactg

SEQ ID NO: 782 - DNA, 20 bp, synthetic construct
  misc_feature 1..20: note = Synthetic oligonucleotide
  source 1..20: mol_type = other DNA
taaatgcatgttgtgtctgc

SEQ ID NO: 783 - DNA, 20 bp, synthetic construct
  misc_feature 1..20: note = Synthetic oligonucleotide
  source 1..20: mol_type = other DNA
ttctacctattttcccacca

SEQ ID NO: 784 - DNA, 20 bp, synthetic construct
  misc_feature 1..20: note = Synthetic oligonucleotide
  source 1..20: mol_type = other DNA
ggagtatttgtgcaacatat

SEQ ID NO: 785 - DNA, 20 bp, synthetic construct
  misc_feature 1..20: note = Synthetic oligonucleotide
  source 1..20: mol_type = other DNA
gagtgcttgctacagcagcc

SEQ ID NO: 786 - DNA, 20 bp, synthetic construct
  misc_feature 1..20: note = Synthetic oligonucleotide
  source 1..20: mol_type = other DNA
gtggaagatcactggattca

SEQ ID NO: 787 - DNA, 20 bp, synthetic construct
  misc_feature 1..20: note = Synthetic oligonucleotide
  source 1..20: mol_type = other DNA
ccgctgcgactgagtaactc

SEQ ID NO: 788 - DNA, 20 bp, synthetic construct
  misc_feature 1..20: note = Synthetic oligonucleotide
  source 1..20: mol_type = other DNA
gtcggggccatgatgccgcc

SEQ ID NO: 789 - DNA, 20 bp, synthetic construct
  misc_feature 1..20: note = Synthetic oligonucleotide
  source 1..20: mol_type = other DNA
agggtcggggccatgatgcc

SEQ ID NO: 790 - DNA, 20 bp, synthetic construct
  misc_feature 1..20: note = Synthetic oligonucleotide
  source 1..20: mol_type = other DNA
cccgcgccagaattgccccc

SEQ ID NO: 791 - DNA, 20 bp, synthetic construct
  misc_feature 1..20: note = Synthetic oligonucleotide
  source 1..20: mol_type = other DNA
ccggcgagcaccgaagccaa

SEQ ID NO: 792 - DNA, 20 bp, synthetic construct
  misc_feature 1..20: note = Synthetic oligonucleotide
  source 1..20: mol_type = other DNA
ggaccaggtgccggcgatag

SEQ ID NO: 793 - DNA, 20 bp, synthetic construct
  misc_feature 1..20: note = Synthetic oligonucleotide
  source 1..20: mol_type = other DNA
cactcggatcaggcgcgtcc

SEQ ID NO: 794 - DNA, 20 bp, synthetic construct
  misc_feature 1..20: note = Synthetic oligonucleotide
  source 1..20: mol_type = other DNA
gaatctccggtcgccacagc

SEQ ID NO: 795 - DNA, 20 bp, synthetic construct
  misc_feature 1..20: note = Synthetic oligonucleotide
  source 1..20: mol_type = other DNA
agaatctccggtcgccacag

SEQ ID NO: 796 - DNA, 20 bp, synthetic construct
  misc_feature 1..20: note = Synthetic oligonucleotide
  source 1..20: mol_type = other DNA
cgcagaggtgcccaggcggc

SEQ ID NO: 797 - DNA, 20 bp, synthetic construct
  misc_feature 1..20: note = Synthetic oligonucleotide
  source 1..20: mol_type = other DNA
gtcacgtacacaataggttg

SEQ ID NO: 798 - DNA, 20 bp, synthetic construct
  misc_feature 1..20: note = Synthetic oligonucleotide
  source 1..20: mol_type = other DNA
tttttcgtgactgttgctcc

SEQ ID NO: 799 - DNA, 20 bp, synthetic construct
  misc_feature 1..20: note = Synthetic oligonucleotide
  source 1..20: mol_type = other DNA
gtgttcgagagatcaaatct

SEQ ID NO: 800 - DNA, 20 bp, synthetic construct
  misc_feature 1..20: note = Synthetic oligonucleotide
  source 1..20: mol_type = other DNA
ggattttgggcaagccgcct

SEQ ID NO: 801 - DNA, 20 bp, synthetic construct
  misc_feature 1..20: note = Synthetic oligonucleotide
  source 1..20: mol_type = other DNA
gcgcgcgtgcacacacacac

SEQ ID NO: 802 - DNA, 20 bp, synthetic construct
  misc_feature 1..20: note = Synthetic oligonucleotide
  source 1..20: mol_type = other DNA
caccttaggtccgaagtaat

SEQ ID NO: 803 - DNA, 20 bp, synthetic construct
  misc_feature 1..20: note = Synthetic oligonucleotide
  source 1..20: mol_type = other DNA
tggatagcggaaatggtggt

SEQ ID NO: 804 - DNA, 20 bp, synthetic construct
  misc_feature 1..20: note = Synthetic oligonucleotide
  source 1..20: mol_type = other DNA
gtggatagcggaaatggtgg

SEQ ID NO: 805 - DNA, 20 bp, synthetic construct
  misc_feature 1..20: note = Synthetic oligonucleotide
  source 1..20: mol_type = other DNA
gtacttggcacgattttctg

SEQ ID NO: 806 - DNA, 20 bp, synthetic construct
  misc_feature 1..20: note = Synthetic oligonucleotide
  source 1..20: mol_type = other DNA
agggggccctcatcaagtag

SEQ ID NO: 807 - DNA, 20 bp, synthetic construct
  misc_feature 1..20: note = Synthetic oligonucleotide
  source 1..20: mol_type = other DNA
tgttaggaatactcgatttt

SEQ ID NO: 808 - DNA, 20 bp, synthetic construct
  misc_feature 1..20: note = Synthetic oligonucleotide
  source 1..20: mol_type = other DNA
ggtcaatcgtgattcctttt

SEQ ID NO: 809 - DNA, 20 bp, synthetic construct
  misc_feature 1..20: note = Synthetic oligonucleotide
  source 1..20: mol_type = other DNA
gtcactggacatagcgtggc

SEQ ID NO: 810 - DNA, 20 bp, synthetic construct
  misc_feature 1..20: note = Synthetic oligonucleotide
  source 1..20: mol_type = other DNA
agtcactggacatagcgtgg

SEQ ID NO: 811 - DNA, 20 bp, synthetic construct
  misc_feature 1..20: note = Synthetic oligonucleotide
  source 1..20: mol_type = other DNA
atccggcccttagtcactcc

SEQ ID NO: 812 - DNA, 20 bp, synthetic construct
  misc_feature 1..20: note = Synthetic oligonucleotide
  source 1..20: mol_type = other DNA
aatccggcccttagtcactc

SEQ ID NO: 813 - DNA, 20 bp, synthetic construct
  misc_feature 1..20: note = Synthetic oligonucleotide
  source 1..20: mol_type = other DNA
tgaaaaatggttccattttc

SEQ ID NO: 814 - DNA, 20 bp, synthetic construct
  misc_feature 1..20: note = Synthetic oligonucleotide
  source 1..20: mol_type = other DNA
tctgacaccccgtcacctct

SEQ ID NO: 815 - DNA, 20 bp, synthetic construct
  misc_feature 1..20: note = Synthetic oligonucleotide
  source 1..20: mol_type = other DNA
gcacatgcataatcgctcct

SEQ ID NO: 816 - DNA, 20 bp, synthetic construct
  misc_feature 1..20: note = Synthetic oligonucleotide
  source 1..20: mol_type = other DNA
ttacttttaataataggagc

SEQ ID NO: 817 - DNA, 20 bp, synthetic construct
  misc_feature 1..20: note = Synthetic oligonucleotide
  source 1..20: mol_type = other DNA
tttcatgacggcaaggacaa

SEQ ID NO: 818 - DNA, 20 bp, synthetic construct
  misc_feature 1..20: note = Synthetic oligonucleotide
  source 1..20: mol_type = other DNA
atttcatgacggcaaggaca

SEQ ID NO: 819 - DNA, 20 bp, synthetic construct
  misc_feature 1..20: note = Synthetic oligonucleotide
  source 1..20: mol_type = other DNA
tgggatgaattcctactgcc

SEQ ID NO: 820 - DNA, 20 bp, synthetic construct
  misc_feature 1..20: note = Synthetic oligonucleotide
  source 1..20: mol_type = other DNA
ggttaacgtctaacttgtct

SEQ ID NO: 821 - DNA, 20 bp, synthetic construct
  misc_feature 1..20: note = Synthetic oligonucleotide
  source 1..20: mol_type = other DNA
gctaggatttagacgaactc

SEQ ID NO: 822 - DNA, 20 bp, synthetic construct
  misc_feature 1..20: note = Synthetic oligonucleotide
  source 1..20: mol_type = other DNA
ttcataactggatctctgat

SEQ ID NO: 823 - DNA, 20 bp, synthetic construct
  misc_feature 1..20: note = Synthetic oligonucleotide
  source 1..20: mol_type = other DNA
cagtagttccggccgccccc

SEQ ID NO: 824 - DNA, 20 bp, synthetic construct
  misc_feature 1..20: note = Synthetic oligonucleotide
  source 1..20: mol_type = other DNA
ccagtagttccggccgcccc

SEQ ID NO: 825 - DNA, 20 bp, synthetic construct
  misc_feature 1..20: note = Synthetic oligonucleotide
  source 1..20: mol_type = other DNA
gttatgcgaacgtgatctct

SEQ ID NO: 826 - DNA, 20 bp, synthetic construct
  misc_feature 1..20: note = Synthetic oligonucleotide
  source 1..20: mol_type = other DNA
atcatagttatgcgaacgtg

SEQ ID NO: 827 - DNA, 20 bp, synthetic construct
  misc_feature 1..20: note = Synthetic oligonucleotide
  source 1..20: mol_type = other DNA
gtaggcgtataaacaggtgc

SEQ ID NO: 828 - DNA, 20 bp, synthetic construct
  misc_feature 1..20: note = Synthetic oligonucleotide
  source 1..20: mol_type = other DNA
tccactaaacagccgctatc

SEQ ID NO: 829 - DNA, 20 bp, synthetic construct
  misc_feature 1..20: note = Synthetic oligonucleotide
  source 1..20: mol_type = other DNA
acctcagacccacaagtagc

SEQ ID NO: 830 - DNA, 20 bp, synthetic construct
  misc_feature 1..20: note = Synthetic oligonucleotide
  source 1..20: mol_type = other DNA
actcagctacacttcatact

SEQ ID NO: 831 - DNA, 20 bp, synthetic construct
  misc_feature 1..20: note = Synthetic oligonucleotide
  source 1..20: mol_type = other DNA
ctctggggttcgagcgattc

SEQ ID NO: 832 - DNA, 20 bp, synthetic construct
  misc_feature 1..20: note = Synthetic oligonucleotide
  source 1..20: mol_type = other DNA
cacagagaccggtccaccca

SEQ ID NO: 833 - DNA, 20 bp, synthetic construct
  misc_feature 1..20: note = Synthetic oligonucleotide
  source 1..20: mol_type = other DNA
aacttgcacaattcggtcca

SEQ ID NO: 834 - DNA, 20 bp, synthetic construct
  misc_feature 1..20: note = Synthetic oligonucleotide
  source 1..20: mol_type = other DNA
gtcaaacactgtgtagtagg

SEQ ID NO: 835 - DNA, 20 bp, synthetic construct
  misc_feature 1..20: note = Synthetic oligonucleotide
  source 1..20: mol_type = other DNA
tttaagttagggtccctgtg

SEQ ID NO: 836 - DNA, 20 bp, synthetic construct
  misc_feature 1..20: note = Synthetic oligonucleotide
  source 1..20: mol_type = other DNA
ggagcatgaagctgtcagct

SEQ ID NO: 837 - DNA, 20 bp, synthetic construct
  misc_feature 1..20: note = Synthetic oligonucleotide
  source 1..20: mol_type = other DNA
ctagcaggtcacggcaagct

SEQ ID NO: 838 - DNA, 20 bp, synthetic construct
  misc_feature 1..20: note = Synthetic oligonucleotide
  source 1..20: mol_type = other DNA
gatggtgaacggactcctga

SEQ ID NO: 839 - DNA, 20 bp, synthetic construct
  misc_feature 1..20: note = Synthetic oligonucleotide
  source 1..20: mol_type = other DNA
ccataccggttaggtcccca

SEQ ID NO: 840 - DNA, 20 bp, synthetic construct
  misc_feature 1..20: note = Synthetic oligonucleotide
  source 1..20: mol_type = other DNA
ctccatccataccggttagg

SEQ ID NO: 841 - DNA, 20 bp, synthetic construct
  misc_feature 1..20: note = Synthetic oligonucleotide
  source 1..20: mol_type = other DNA
ccacattattcgggctcaaa

SEQ ID NO: 842 - DNA, 20 bp, synthetic construct
  misc_feature 1..20: note = Synthetic oligonucleotide
  source 1..20: mol_type = other DNA
tgatctgtcactatctccca

SEQ ID NO: 843 - DNA, 20 bp, synthetic construct
  misc_feature 1..20: note = Synthetic oligonucleotide
  source 1..20: mol_type = other DNA
gtcacggactggtaccagac

SEQ ID NO: 844 - DNA, 20 bp, synthetic construct
  misc_feature 1..20: note = Synthetic oligonucleotide
  source 1..20: mol_type = other DNA
gctcctactaacgtactgta

SEQ ID NO: 845 - DNA, 20 bp, synthetic construct
  misc_feature 1..20: note = Synthetic oligonucleotide
  source 1..20: mol_type = other DNA
tgggcatggtggcacgtgct

SEQ ID NO: 846 - DNA, 20 bp, synthetic construct
  misc_feature 1..20: note = Synthetic oligonucleotide
  source 1..20: mol_type = other DNA
ggacgagactggtcatagat

SEQ ID NO: 847 - DNA, 20 bp, synthetic construct
  misc_feature 1..20: note = Synthetic oligonucleotide
  source 1..20: mol_type = other DNA
taatccggacgagactggtc

SEQ ID NO: 848 - DNA, 20 bp, synthetic construct
  misc_feature 1..20: note = Synthetic oligonucleotide
  source 1..20: mol_type = other DNA
tgaggacaggcacaatttat

SEQ ID NO: 849 - DNA, 20 bp, synthetic construct
  misc_feature 1..20: note = Synthetic oligonucleotide
  source 1..20: mol_type = other DNA
gaactctcattaccatatga

SEQ ID NO: 850 - DNA, 20 bp, synthetic construct
  misc_feature 1..20: note = Synthetic oligonucleotide
  source 1..20: mol_type = other DNA
accagtcgttggcgcagagc

SEQ ID NO: 851 - DNA, 20 bp, synthetic construct
  misc_feature 1..20: note = Synthetic oligonucleotide
  source 1..20: mol_type = other DNA
ggctgaggtgtgatgcagga

SEQ ID NO: 852 - DNA, 20 bp, synthetic construct
  misc_feature 1..20: note = Synthetic oligonucleotide
  source 1..20: mol_type = other DNA
aattggctgaggtgtgatgc

SEQ ID NO: 853 - DNA, 20 bp, synthetic construct
  misc_feature 1..20: note = Synthetic oligonucleotide
  source 1..20: mol_type = other DNA
agggccgccacacgaaagag

SEQ ID NO: 854 - DNA, 20 bp, synthetic construct
  misc_feature 1..20: note = Synthetic oligonucleotide
  source 1..20: mol_type = other DNA
cagcacggtcgtaactgcaa

SEQ ID NO: 855 - DNA, 20 bp, synthetic construct
  misc_feature 1..20: note = Synthetic oligonucleotide
  source 1..20: mol_type = other DNA
aaggcttccaggaatcagag

SEQ ID NO: 856 - DNA, 20 bp, synthetic construct
  misc_feature 1..20: note = Synthetic oligonucleotide
  source 1..20: mol_type = other DNA
gaatacagattcggcatggt

SEQ ID NO: 857 - DNA, 20 bp, synthetic construct
  misc_feature 1..20: note = Synthetic oligonucleotide
  source 1..20: mol_type = other DNA
gctaagcgggcctttgctta

SEQ ID NO: 858 - DNA, 20 bp, synthetic construct
  misc_feature 1..20: note = Synthetic oligonucleotide
  source 1..20: mol_type = other DNA
gccttttctatgtggaacct

SEQ ID NO: 859 - DNA, 20 bp, synthetic construct
  misc_feature 1..20: note = Synthetic oligonucleotide
  source 1..20: mol_type = other DNA
gctctcgcataagcttttcc

SEQ ID NO: 860 - DNA, 20 bp, synthetic construct
  misc_feature 1..20: note = Synthetic oligonucleotide
  source 1..20: mol_type = other DNA
gctgtgaaagtagcttggga

SEQ ID NO: 861 - DNA, 20 bp, synthetic construct
  misc_feature 1..20: note = Synthetic oligonucleotide
  source 1..20: mol_type = other DNA
agggcagggtgttatcttat

SEQ ID NO: 862 - DNA, 20 bp, synthetic construct
  misc_feature 1..20: note = Synthetic oligonucleotide
  source 1..20: mol_type = other DNA
atttcgcctagaacacatcc

SEQ ID NO: 863 - DNA, 20 bp, synthetic construct
  misc_feature 1..20: note = Synthetic oligonucleotide
  source 1..20: mol_type = other DNA
gaatttcccgcttgacgtgt

SEQ ID NO: 864 - DNA, 20 bp, synthetic construct
  misc_feature 1..20: note = Synthetic oligonucleotide
  source 1..20: mol_type = other DNA
tgtgttgggaccgtgaccca

SEQ ID NO: 865 - DNA, 20 bp, synthetic construct
  misc_feature 1..20: note = Synthetic oligonucleotide
  source 1..20: mol_type = other DNA
ttgtgttgggaccgtgaccc

SEQ ID NO: 866 - DNA, 20 bp, synthetic construct
  misc_feature 1..20: note = Synthetic oligonucleotide
  source 1..20: mol_type = other DNA
ctcattacgtggctggtccc

SEQ ID NO: 867 - DNA, 20 bp, synthetic construct
  misc_feature 1..20: note = Synthetic oligonucleotide
  source 1..20: mol_type = other DNA
ctccacctcccttgttaccc

SEQ ID NO: 868 - DNA, 20 bp, synthetic construct
  misc_feature 1..20: note = Synthetic oligonucleotide
  source 1..20: mol_type = other DNA
aggattctcagtgcaggctg

SEQ ID NO: 869 - DNA, 20 bp, synthetic construct
  misc_feature 1..20: note = Synthetic oligonucleotide
  source 1..20: mol_type = other DNA
cattcttatcagaccgtctg

SEQ ID NO: 870 - DNA, 20 bp, synthetic construct
  misc_feature 1..20: note = Synthetic oligonucleotide
  source 1..20: mol_type = other DNA
gaaagccgctgattacaaca

SEQ ID NO: 871 - DNA, 20 bp, synthetic construct
  misc_feature 1..20: note = Synthetic oligonucleotide
  source 1..20: mol_type = other DNA
ccagcaagactttgactata

SEQ ID NO: 872 - DNA, 20 bp, synthetic construct
  misc_feature 1..20: note = Synthetic oligonucleotide
  source 1..20: mol_type = other DNA
gtgacgggttgataggtgca

SEQ ID NO: 873 - DNA, 20 bp, synthetic construct
  misc_feature 1..20: note = Synthetic oligonucleotide
  source 1..20: mol_type = other DNA
taatagctaggtgacgggtt

SEQ ID NO: 874 - DNA, 20 bp, synthetic construct
  misc_feature 1..20: note = Synthetic oligonucleotide
  source 1..20: mol_type = other DNA
tgtaactggacccaagaatt

SEQ ID NO: 875 - DNA, 20 bp, synthetic construct
  misc_feature 1..20: note = Synthetic oligonucleotide
  source 1..20: mol_type = other DNA
cattataccacggctcaatg

SEQ ID NO: 876 - DNA, 20 bp, synthetic construct
  misc_feature 1..20: note = Synthetic oligonucleotide
  source 1..20: mol_type = other DNA
tcgaggacatggaccacacc

SEQ ID NO: 877 - DNA, 20 bp, synthetic construct
  misc_feature 1..20: note = Synthetic oligonucleotide
  source 1..20: mol_type = other DNA
aggcggtaacatcggcgatg

SEQ ID NO: 878 - DNA, 20 bp, synthetic construct
  misc_feature 1..20: note = Synthetic oligonucleotide
  source 1..20: mol_type = other DNA
gttcaggcggtaacatcggc

SEQ ID NO: 879 - DNA, 20 bp, synthetic construct
  misc_feature 1..20: note = Synthetic oligonucleotide
  source 1..20: mol_type = other DNA
tctaaagtaccgctcattta

SEQ ID NO: 880 - DNA, 20 bp, synthetic construct
  misc_feature 1..20: note = Synthetic oligonucleotide
  source 1..20: mol_type = other DNA
ccccttctaaagtaccgctc

SEQ ID NO: 881 - DNA, 20 bp, synthetic construct
  misc_feature 1..20: note = Synthetic oligonucleotide
  source 1..20: mol_type = other DNA
tccttaaccataaatagaca

SEQ ID NO: 882 - DNA, 20 bp, synthetic construct
  misc_feature 1..20: note = Synthetic oligonucleotide
  source 1..20: mol_type = other DNA
caccagcgcgtagtcactgt

SEQ ID NO: 883 - DNA, 20 bp, synthetic construct
  misc_feature 1..20: note = Synthetic oligonucleotide
  source 1..20: mol_type = other DNA
ccaaaatatagctataatta

SEQ ID NO: 884 - DNA, 20 bp, synthetic construct
  misc_feature 1..20: note = Synthetic oligonucleotide
  source 1..20: mol_type = other DNA
cgtaatagccttcgtactgg

SEQ ID NO: 885 - DNA, 20 bp, synthetic construct
  misc_feature 1..20: note = Synthetic oligonucleotide
  source 1..20: mol_type = other DNA
gccaggactaccgtaatagc

SEQ ID NO: 886 - DNA, 20 bp, synthetic construct
  misc_feature 1..20: note = Synthetic oligonucleotide
  source 1..20: mol_type = other DNA
gatcacacctcactgcagcc

SEQ ID NO: 887 - DNA, 20 bp, synthetic construct
  misc_feature 1..20: note = Synthetic oligonucleotide
  source 1..20: mol_type = other DNA
ccaccctaatcgaagcctgg

SEQ ID NO: 888 - DNA, 20 bp, synthetic construct
  misc_feature 1..20: note = Synthetic oligonucleotide
  source 1..20: mol_type = other DNA
gctatctaaagacttaaaac

SEQ ID NO: 889 - DNA, 20 bp, synthetic construct
  misc_feature 1..20: note = Synthetic oligonucleotide
  source 1..20: mol_type = other DNA
gataaacgaaacagcggccc

SEQ ID NO: 890 - DNA, 20 bp, synthetic construct
  misc_feature 1..20: note = Synthetic oligonucleotide
  source 1..20: mol_type = other DNA
gctaccgaaaggctatctga

SEQ ID NO: 891 - DNA, 20 bp, synthetic construct
  misc_feature 1..20: note = Synthetic oligonucleotide
  source 1..20: mol_type = other DNA
tagccgtagccattaccctc

SEQ ID NO: 892 - DNA, 20 bp, synthetic construct
  misc_feature 1..20: note = Synthetic oligonucleotide
  source 1..20: mol_type = other DNA
tatcagaacgcttttgagca

SEQ ID NO: 893 - DNA, 20 bp, synthetic construct
  misc_feature 1..20: note = Synthetic oligonucleotide
  source 1..20: mol_type = other DNA
gcacatcttcataaaatctg

SEQ ID NO: 894 - DNA, 20 bp, synthetic construct
  misc_feature 1..20: note = Synthetic oligonucleotide
  source 1..20: mol_type = other DNA
tcagatccagatcaaagtta

SEQ ID NO: 895 - DNA, 20 bp, synthetic construct
  misc_feature 1..20: note = Synthetic oligonucleotide
  source 1..20: mol_type = other DNA
gcacaccggcccctaccgcc

SEQ ID NO: 896 - DNA, 20 bp, synthetic construct
  misc_feature 1..20: note = Synthetic oligonucleotide
  source 1..20: mol_type = other DNA
ataccacgtctgcgcctgac

SEQ ID NO: 897 - DNA, 20 bp, synthetic construct
  misc_feature 1..20: note = Synthetic oligonucleotide
  source 1..20: mol_type = other DNA
gacgagctcagcgctaagga

SEQ ID NO: 898 - DNA, 20 bp, synthetic construct
  misc_feature 1..20: note = Synthetic oligonucleotide
  source 1..20: mol_type = other DNA
ggccatcctcacgataccag

SEQ ID NO: 899 - DNA, 20 bp, synthetic construct
  misc_feature 1..20: note = Synthetic oligonucleotide
  source 1..20: mol_type = other DNA
gacttcgaagcacggtcccc

SEQ ID NO: 900 - DNA, 20 bp, synthetic construct
  misc_feature 1..20: note = Synthetic oligonucleotide
  source 1..20: mol_type = other DNA
tgccttctccttgcacaaga

SEQ ID NO: 901 - DNA, 20 bp, synthetic construct
  misc_feature 1..20: note = Synthetic oligonucleotide
  source 1..20: mol_type = other DNA
ctccaaaaccttcggatgca

SEQ ID NO: 902 - DNA, 20 bp, synthetic construct
  misc_feature 1..20: note = Synthetic oligonucleotide
  source 1..20: mol_type = other DNA
tctccaaaaccttcggatgc

SEQ ID NO: 903 - DNA, 20 bp, synthetic construct
  misc_feature 1..20: note = Synthetic oligonucleotide
  source 1..20: mol_type = other DNA
tgtaattacacacttagaga

SEQ ID NO: 904 - DNA, 20 bp, synthetic construct
  misc_feature 1..20: note = Synthetic oligonucleotide
  source 1..20: mol_type = other DNA
acactcacactccatttctc

SEQ ID NO: 905 - DNA, 20 bp, synthetic construct
  misc_feature 1..20: note = Synthetic oligonucleotide
  source 1..20: mol_type = other DNA
ctcttacgatcctaactaga

SEQ ID NO: 906 - DNA, 20 bp, synthetic construct
  misc_feature 1..20: note = Synthetic oligonucleotide
  source 1..20: mol_type = other DNA
tgatcatgagttctttcttc

SEQ ID NO: 907 - DNA, 20 bp, synthetic construct
  misc_feature 1..20: note = Synthetic oligonucleotide
  source 1..20: mol_type = other DNA
taatgtacggtatccacaca

SEQ ID NO: 908 - DNA, 20 bp, synthetic construct
  misc_feature 1..20: note = Synthetic oligonucleotide
  source 1..20: mol_type = other DNA
ggtgaagaaaacattaatgg

SEQ ID NO: 909 - DNA, 20 bp, synthetic construct
  misc_feature 1..20: note = Synthetic oligonucleotide
  source 1..20: mol_type = other DNA
atgataacgagcagccataa

SEQ ID NO: 910 - DNA, 20 bp, synthetic construct
  misc_feature 1..20: note = Synthetic oligonucleotide
  source 1..20: mol_type = other DNA
tcccattacaaacatagaca

SEQ ID NO: 911 - DNA, 20 bp, synthetic construct
  misc_feature 1..20: note = Synthetic oligonucleotide
  source 1..20: mol_type = other DNA
tgtctactccggtgtgtttt

SEQ ID NO: 912 - DNA, 20 bp, synthetic construct
  misc_feature 1..20: note = Synthetic oligonucleotide
  source 1..20: mol_type = other DNA
cctgtctactccggtgtgtt

SEQ ID NO: 913 - DNA, 20 bp, synthetic construct
  misc_feature 1..20: note = Synthetic oligonucleotide
  source 1..20: mol_type = other DNA
attaacggaagaacgtggat

SEQ ID NO: 914 - DNA, 20 bp, synthetic construct
  misc_feature 1..20: note = Synthetic oligonucleotide
  source 1..20: mol_type = other DNA
aaaagcatgtgacctaacac

SEQ ID NO: 915 - DNA, 20 bp, synthetic construct
  misc_feature 1..20: note = Synthetic oligonucleotide
  source 1..20: mol_type = other DNA
aatccgagccaattacatag

SEQ ID NO: 916 - DNA, 20 bp, synthetic construct
  misc_feature 1..20: note = Synthetic oligonucleotide
  source 1..20: mol_type = other DNA
taaagcatcacttcgaaggt

SEQ ID NO: 917 - DNA, 20 bp, synthetic construct
  misc_feature 1..20: note = Synthetic oligonucleotide
  source 1..20: mol_type = other DNA
tccaagatcgtagaaaggag

SEQ ID NO: 918 - DNA, 20 bp, synthetic construct
  misc_feature 1..20: note = Synthetic oligonucleotide
  source 1..20: mol_type = other DNA
tatcctgcttcagcatccca

SEQ ID NO: 919 - DNA, 20 bp, synthetic construct
  misc_feature 1..20: note = Synthetic oligonucleotide
  source 1..20: mol_type = other DNA
tatgtgtggcaagtcccaga

SEQ ID NO: 920 - DNA, 20 bp, synthetic construct
  misc_feature 1..20: note = Synthetic oligonucleotide
  source 1..20: mol_type = other DNA
agcgcagaagaacgtgtgac

SEQ ID NO: 921 - DNA, 20 bp, synthetic construct
  misc_feature 1..20: note = Synthetic oligonucleotide
  source 1..20: mol_type = other DNA
cagcattccgcttcagcaca

SEQ ID NO: 922 - DNA, 20 bp, synthetic construct
  misc_feature 1..20: note = Synthetic oligonucleotide
  source 1..20: mol_type = other DNA
aaatcagggtagagaagatc

SEQ ID NO: 923 - DNA, 20 bp, synthetic construct
  misc_feature 1..20: note = Synthetic oligonucleotide
  source 1..20: mol_type = other DNA
ccaagttgtttggctcattg

SEQ ID NO: 924 - DNA, 20 bp, synthetic construct
  misc_feature 1..20: note = Synthetic oligonucleotide
  source 1..20: mol_type = other DNA
ggcttgttcgctcacatggg

SEQ ID NO: 925 - DNA, 20 bp, synthetic construct
  misc_feature 1..20: note = Synthetic oligonucleotide
  source 1..20: mol_type = other DNA
tcacattcccacgaaggatc

SEQ ID NO: 926 - DNA, 20 bp, synthetic construct
  misc_feature 1..20: note = Synthetic oligonucleotide
  source 1..20: mol_type = other DNA
tgttctatctacccggctgg

SEQ ID NO: 927 - DNA, 20 bp, synthetic construct
  misc_feature 1..20: note = Synthetic oligonucleotide
  source 1..20: mol_type = other DNA
accatgctacgaagagacat

SEQ ID NO: 928 - DNA, 20 bp, synthetic construct
  misc_feature 1..20: note = Synthetic oligonucleotide
  source 1..20: mol_type = other DNA
taccatgctacgaagagaca

SEQ ID NO: 929 - DNA, 20 bp, synthetic construct
  misc_feature 1..20: note = Synthetic oligonucleotide
  source 1..20: mol_type = other DNA
tggtggtgcagttgtcttgg

SEQ ID NO: 930 - DNA, 20 bp, synthetic construct
  misc_feature 1..20: note = Synthetic oligonucleotide
  source 1..20: mol_type = other DNA
tgagaagacaagccacagac

SEQ ID NO: 931 - DNA, 20 bp, synthetic construct
  misc_feature 1..20: note = Synthetic oligonucleotide
  source 1..20: mol_type = other DNA
tgagcatggcgaaggattct

SEQ ID NO: 932 - DNA, 20 bp, synthetic construct
  misc_feature 1..20: note = Synthetic oligonucleotide
  source 1..20: mol_type = other DNA
tgcatgtaggcaggggaagg

SEQ ID NO: 933 - DNA, 20 bp, synthetic construct
  misc_feature 1..20: note = Synthetic oligonucleotide
  source 1..20: mol_type = other DNA
tacaacaggaacaccctatt

SEQ ID NO: 934 - DNA, 20 bp, synthetic construct
  misc_feature 1..20: note = Synthetic oligonucleotide
  source 1..20: mol_type = other DNA
atgactgcagcactgtttgg

SEQ ID NO: 935 - DNA, 20 bp, synthetic construct
  misc_feature 1..20: note = Synthetic oligonucleotide
  source 1..20: mol_type = other DNA
ggtctctcgtttgcaagatg

SEQ ID NO: 936 - DNA, 20 bp, synthetic construct
  misc_feature 1..20: note = Synthetic oligonucleotide
  source 1..20: mol_type = other DNA
gtgtaaggtctctcgtttgc

SEQ ID NO: 937 - DNA, 20 bp, synthetic construct
  misc_feature 1..20: note = Synthetic oligonucleotide
  source 1..20: mol_type = other DNA
agccgtcaacacattattat

SEQ ID NO: 938 - DNA, 20 bp, synthetic construct
  misc_feature 1..20: note = Synthetic oligonucleotide
  source 1..20: mol_type = other DNA
acttcaactgatccgcctgc

SEQ ID NO: 939 - DNA, 20 bp, synthetic construct
  misc_feature 1..20: note = Synthetic oligonucleotide
  source 1..20: mol_type = other DNA
taagcatcttaatatcaaca

SEQ ID NO: 940 - DNA, 20 bp, synthetic construct
  misc_feature 1..20: note = Synthetic oligonucleotide
  source 1..20: mol_type = other DNA
gcggagcactgcacgggatg

SEQ ID NO: 941 - DNA, 20 bp, synthetic construct
  misc_feature 1..20: note = Synthetic oligonucleotide
  source 1..20: mol_type = other DNA
atagcggagcactgcacggg

SEQ ID NO: 942 - DNA, 20 bp, synthetic construct
  misc_feature 1..20: note = Synthetic oligonucleotide
  source 1..20: mol_type = other DNA
tgaagtttgtgtgtggcact

SEQ ID NO: 943 - DNA, 20 bp, synthetic construct
  misc_feature 1..20: note = Synthetic oligonucleotide
  source 1..20: mol_type = other DNA
gcttgggacacggattagga

SEQ ID NO: 944 - DNA, 20 bp, synthetic construct
  misc_feature 1..20: note = Synthetic oligonucleotide
  source 1..20: mol_type = other DNA
gtctatagggacttatgggg

SEQ ID NO: 945 - DNA, 20 bp, synthetic construct
  misc_feature 1..20: note = Synthetic oligonucleotide
  source 1..20: mol_type = other DNA
gtggtcaggagtatagtgaa

SEQ ID NO: 946 - DNA, 20 bp, synthetic construct
  misc_feature 1..20: note = Synthetic oligonucleotide
  source 1..20: mol_type = other DNA
gggtggaagaaaagggaaaa

SEQ ID NO: 947 - DNA, 20 bp, synthetic construct
  misc_feature 1..20: note = Synthetic oligonucleotide
  source 1..20: mol_type = other DNA
gtataacatgttgcagggtg

SEQ ID NO: 948 - DNA, 20 bp, synthetic construct
  misc_feature 1..20: note = Synthetic oligonucleotide
  source 1..20: mol_type = other DNA
ggagtacttataggtcctgt

SEQ ID NO: 949 - DNA, 20 bp, synthetic construct
  misc_feature 1..20: note = Synthetic oligonucleotide
  source 1..20: mol_type = other DNA
ttgagcccaggcgtttgtgg

SEQ ID NO: 950 - DNA, 20 bp, synthetic construct
  misc_feature 1..20: note = Synthetic oligonucleotide
  source 1..20: mol_type = other DNA
cggtcaggcacaatggctca

SEQ ID NO: 951 - DNA, 20 bp, synthetic construct
  misc_feature 1..20: note = Synthetic oligonucleotide
  source 1..20: mol_type = other DNA
agattgtctcattttttgat

SEQ ID NO: 952 - DNA, 20 bp, synthetic construct
  misc_feature 1..20: note = Synthetic oligonucleotide
  source 1..20: mol_type = other DNA
agtctgcgtggaggaaagta

SEQ ID NO: 953 - DNA, 20 bp, synthetic construct
  misc_feature 1..20: note = Synthetic oligonucleotide
  source 1..20: mol_type = other DNA
tctttcaacaagctgtgccc

SEQ ID NO: 954 - DNA, 20 bp, synthetic construct
  misc_feature 1..20: note = Synthetic oligonucleotide
  source 1..20: mol_type = other DNA
ttctttcaacaagctgtgcc

SEQ ID NO: 955 - DNA, 20 bp, synthetic construct
  misc_feature 1..20: note = Synthetic oligonucleotide
  source 1..20: mol_type = other DNA
ttctggcccttcataatgaa

SEQ ID NO: 956 - DNA, 20 bp, synthetic construct
  misc_feature 1..20: note = Synthetic oligonucleotide
  source 1..20: mol_type = other DNA
cagacgcttgataagatcag

SEQ ID NO: 957 - DNA, 20 bp, synthetic construct
  misc_feature 1..20: note = Synthetic oligonucleotide
  source 1..20: mol_type = other DNA
tgatgcgcaccataggaaca

SEQ ID NO: 958 - DNA, 20 bp, synthetic construct
  misc_feature 1..20: note = Synthetic oligonucleotide
  source 1..20: mol_type = other DNA
tggctagctctaatccagga

SEQ ID NO: 959 - DNA, 20 bp, synthetic construct
  misc_feature 1..20: note = Synthetic oligonucleotide
  source 1..20: mol_type = other DNA
tggagcaagtcggtagagcc

SEQ ID NO: 960 - DNA, 20 bp, synthetic construct
  misc_feature 1..20: note = Synthetic oligonucleotide
  source 1..20: mol_type = other DNA
gatgatcacagacagataag

SEQ ID NO: 961 - DNA, 20 bp, synthetic construct
  misc_feature 1..20: note = Synthetic oligonucleotide
  source 1..20: mol_type = other DNA
tcctgtcacagtcctggtaa

SEQ ID NO: 962 - DNA, 20 bp, synthetic construct
  misc_feature 1..20: note = Synthetic oligonucleotide
  source 1..20: mol_type = other DNA
gagcatactcatgcctgttg

SEQ ID NO: 963 - DNA, 20 bp, synthetic construct
  misc_feature 1..20: note = Synthetic oligonucleotide
  source 1..20: mol_type = other DNA
gccatgattacttgctaaca

SEQ ID NO: 964 - DNA, 20 bp, synthetic construct
  misc_feature 1..20: note = Synthetic oligonucleotide
  source 1..20: mol_type = other DNA
aagggatcaagagctgctct

SEQ ID NO: 965 - DNA, 20 bp, synthetic construct
  misc_feature 1..20: note = Synthetic oligonucleotide
  source 1..20: mol_type = other DNA
gagagatttcttggtttccc

SEQ ID NO: 966 - DNA, 20 bp, synthetic construct
  misc_feature 1..20: note = Synthetic oligonucleotide
  source 1..20: mol_type = other DNA
gagggcctaagtgacacgag

SEQ ID NO: 967 - DNA, 20 bp, synthetic construct
  misc_feature 1..20: note = Synthetic oligonucleotide
  source 1..20: mol_type = other DNA
cctgagcacccagcactccc

SEQ ID NO: 968 - DNA, 20 bp, synthetic construct
  misc_feature 1..20: note = Synthetic oligonucleotide
  source 1..20: mol_type = other DNA
aggagctactgtgaattaca

SEQ ID NO: 969 - DNA, 20 bp, synthetic construct
  misc_feature 1..20: note = Synthetic oligonucleotide
  source 1..20: mol_type = other DNA
gggcagactggctcgtaggg

SEQ ID NO: 970 - DNA, 20 bp, synthetic construct
  misc_feature 1..20: note = Synthetic oligonucleotide
  source 1..20: mol_type = other DNA
gcatgatgtgaagatccccc

SEQ ID NO: 971 - DNA, 20 bp, synthetic construct
  misc_feature 1..20: note = Synthetic oligonucleotide
  source 1..20: mol_type = other DNA
tgactggcaatatttcttcc

SEQ ID NO: 972 - DNA, 20 bp, synthetic construct
  misc_feature 1..20: note = Synthetic oligonucleotide
  source 1..20: mol_type = other DNA
tacttatgcacggttgcaga

SEQ ID NO: 973 - DNA, 20 bp, synthetic construct
  misc_feature 1..20: note = Synthetic oligonucleotide
  source 1..20: mol_type = other DNA
gcatacatacgctgacgcac

SEQ ID NO: 974 - DNA, 20 bp, synthetic construct
  misc_feature 1..20: note = Synthetic oligonucleotide
  source 1..20: mol_type = other DNA
taactgcccgccttttcaac

SEQ ID NO: 975 - DNA, 20 bp, synthetic construct
  misc_feature 1..20: note = Synthetic oligonucleotide
  source 1..20: mol_type = other DNA
ctctactctcactggcttgt

SEQ ID NO: 976 - DNA, 20 bp, synthetic construct
  misc_feature 1..20: note = Synthetic oligonucleotide
  source 1..20: mol_type = other DNA
atggttcggtattattcagc

SEQ ID NO: 977 - DNA, 20 bp, synthetic construct
  misc_feature 1..20: note = Synthetic oligonucleotide
  source 1..20: mol_type = other DNA
cctattttcccccccaaagt

SEQ ID NO: 978 - DNA, 20 bp, synthetic construct
  misc_feature 1..20: note = Synthetic oligonucleotide
  source 1..20: mol_type = other DNA
gttgacatcggaagctggtc

SEQ ID NO: 979 - DNA, 20 bp, synthetic construct
  misc_feature 1..20: note = Synthetic oligonucleotide
  source 1..20: mol_type = other DNA
cagactcaccgtatgtagtg

SEQ ID NO: 980 - DNA, 20 bp, synthetic construct
  misc_feature 1..20: note = Synthetic oligonucleotide
  source 1..20: mol_type = other DNA
gccacttttaaagccccttt

SEQ ID NO: 981 - DNA, 20 bp, synthetic construct
  misc_feature 1..20: note = Synthetic oligonucleotide
  source 1..20: mol_type = other DNA
acgttcaggtaatcccaagg

SEQ ID NO: 982 - DNA, 20 bp, synthetic construct
  misc_feature 1..20: note = Synthetic oligonucleotide
  source 1..20: mol_type = other DNA
agagctgacaaaaacgacga

SEQ ID NO: 983 - DNA, 20 bp, synthetic construct
  misc_feature 1..20: note = Synthetic oligonucleotide
  source 1..20: mol_type = other DNA
gactgacacccgagatactg

SEQ ID NO: 984 - DNA, 20 bp, synthetic construct
  misc_feature 1..20: note = Synthetic oligonucleotide
  source 1..20: mol_type = other DNA
ggaggtagctcaacccgtgt

SEQ ID NO: 985 - DNA, 20 bp, synthetic construct
  misc_feature 1..20: note = Synthetic oligonucleotide
  source 1..20: mol_type = other DNA
caaagggaattaaacttgca

SEQ ID NO: 986 - DNA, 20 bp, synthetic construct
  misc_feature 1..20: note = Synthetic oligonucleotide
  source 1..20: mol_type = other DNA
tgcaagctatatccggagat

SEQ ID NO: 987 - DNA, 20 bp, synthetic construct
  misc_feature 1..20: note = Synthetic oligonucleotide
  source 1..20: mol_type = other DNA
ggttacttccagtacgacaa

SEQ ID NO: 988 - DNA, 20 bp, synthetic construct
  misc_feature 1..20: note = Synthetic oligonucleotide
  source 1..20: mol_type = other DNA
agcgaagacatttacaagag

SEQ ID NO: 989 - DNA, 20 bp, synthetic construct
  misc_feature 1..20: note = Synthetic oligonucleotide
  source 1..20: mol_type = other DNA
gtaggtaggagcgtgtcaat

SEQ ID NO: 990 - DNA, 20 bp, synthetic construct
  misc_feature 1..20: note = Synthetic oligonucleotide
  source 1..20: mol_type = other DNA
gtacctgatcgagcaatgcc

SEQ ID NO: 991 - DNA, 20 bp, synthetic construct
  misc_feature 1..20: note = Synthetic oligonucleotide
  source 1..20: mol_type = other DNA
caagtacctgatcgagcaat

SEQ ID NO: 992 - DNA, 20 bp, synthetic construct
  misc_feature 1..20: note = Synthetic oligonucleotide
  source 1..20: mol_type = other DNA
ggaccttggagtagtgtgga

SEQ ID NO: 993 - DNA, 20 bp, synthetic construct
  misc_feature 1..20: note = Synthetic oligonucleotide
  source 1..20: mol_type = other DNA
ctctgttgtccagcctggag

SEQ ID NO: 994 - DNA, 20 bp, synthetic construct
  misc_feature 1..20: note = Synthetic oligonucleotide
  source 1..20: mol_type = other DNA
cagtgttcagaacgggcccc

SEQ ID NO: 995 - DNA, 20 bp, synthetic construct
  misc_feature 1..20: note = Synthetic oligonucleotide
  source 1..20: mol_type = other DNA
ccctcaaattccctgaatct

SEQ ID NO: 996 - DNA, 20 bp, synthetic construct
  misc_feature 1..20: note = Synthetic oligonucleotide
  source 1..20: mol_type = other DNA
gaaatcttagcgaacaaatt

SEQ ID NO: 997 - DNA, 20 bp, synthetic construct
  misc_feature 1..20: note = Synthetic oligonucleotide
  source 1..20: mol_type = other DNA
gtgacgaaaatggcacttta

SEQ ID NO: 998 - DNA, 20 bp, synthetic construct
  misc_feature 1..20: note = Synthetic oligonucleotide
  source 1..20: mol_type = other DNA
ggtatggggtaagcatcctg

SEQ ID NO: 999 - DNA, 20 bp, synthetic construct
  misc_feature 1..20: note = Synthetic oligonucleotide
  source 1..20: mol_type = other DNA
caacatagtggggccttgtt

SEQ ID NO: 1000 - DNA, 20 bp, synthetic construct
  misc_feature 1..20: note = Synthetic oligonucleotide
  source 1..20: mol_type = other DNA
ttccaaactttagcttctgg

SEQ ID NO: 1001 - DNA, 20 bp, synthetic construct
  misc_feature 1..20: note = Synthetic oligonucleotide
  source 1..20: mol_type = other DNA
ccaggtgctcactcctttgg

SEQ ID NO: 1002 - DNA, 20 bp, synthetic construct
  misc_feature 1..20: note = Synthetic oligonucleotide
  source 1..20: mol_type = other DNA
gcccaggtgctcactccttt

SEQ ID NO: 1003 - DNA, 20 bp, synthetic construct
  misc_feature 1..20: note = Synthetic oligonucleotide
  source 1..20: mol_type = other DNA
gtgggatatcccgttgctgg

SEQ ID NO: 1004 - DNA, 20 bp, synthetic construct
  misc_feature 1..20: note = Synthetic oligonucleotide
  source 1..20: mol_type = other DNA
gcttcacaaaggattttaat

SEQ ID NO: 1005 - DNA, 20 bp, synthetic construct
  misc_feature 1..20: note = Synthetic oligonucleotide
  source 1..20: mol_type = other DNA
ggggtacaagtgcagttttg

SEQ ID NO: 1006 - DNA, 20 bp, synthetic construct
  misc_feature 1..20: note = Synthetic oligonucleotide
  source 1..20: mol_type = other DNA
gcagggggtattacatccac

SEQ ID NO: 1007 - DNA, 20 bp, synthetic construct
  misc_feature 1..20: note = Synthetic oligonucleotide
  source 1..20: mol_type = other DNA
gacgcagggggtattacatc

SEQ ID NO: 1008 - DNA, 20 bp, synthetic construct
  misc_feature 1..20: note = Synthetic oligonucleotide
  source 1..20: mol_type = other DNA
ccttcccgtacctaagatgc

SEQ ID NO: 1009 - DNA, 20 bp, synthetic construct
  misc_feature 1..20: note = Synthetic oligonucleotide
  source 1..20: mol_type = other DNA
cccatccccacgatacatct

SEQ ID NO: 1010 - DNA, 20 bp, synthetic construct
  misc_feature 1..20: note = Synthetic oligonucleotide
  source 1..20: mol_type = other DNA
ggcttatttattctgccgaa

SEQ ID NO: 1011 - DNA, 20 bp, synthetic construct
  misc_feature 1..20: note = Synthetic oligonucleotide
  source 1..20: mol_type = other DNA
tttcagacagtggtaactac

SEQ ID NO: 1012 - DNA, 20 bp, synthetic construct
  misc_feature 1..20: note = Synthetic oligonucleotide
  source 1..20: mol_type = other DNA
gtgcctccagttaactctgt

SEQ ID NO: 1013 - DNA, 20 bp, synthetic construct
  misc_feature 1..20: note = Synthetic oligonucleotide
  source 1..20: mol_type = other DNA
tacggcctagcatctacatg

SEQ ID NO: 1014 - DNA, 20 bp, synthetic construct
  misc_feature 1..20: note = Synthetic oligonucleotide
  source 1..20: mol_type = other DNA
gcatgcaatgctcgagtgct

SEQ ID NO: 1015 - DNA, 20 bp, synthetic construct
  misc_feature 1..20: note = Synthetic oligonucleotide
  source 1..20: mol_type = other DNA
gctatctgctagcggattct

SEQ ID NO: 1016 - DNA, 20 bp, synthetic construct
  misc_feature 1..20: note = Synthetic oligonucleotide
  source 1..20: mol_type = other DNA
cagagaggacgatcggtgga

SEQ ID NO: 1017 - DNA, 20 bp, synthetic construct
  misc_feature 1..20: note = Synthetic oligonucleotide
  source 1..20: mol_type = other DNA
ctgcagagaggacgatcggt

SEQ ID NO: 1018 - DNA, 20 bp, synthetic construct
  misc_feature 1..20: note = Synthetic oligonucleotide
  source 1..20: mol_type = other DNA
ctacgaactacactgcctgg

SEQ ID NO: 1019 - DNA, 20 bp, synthetic construct
  misc_feature 1..20: note = Synthetic oligonucleotide
  source 1..20: mol_type = other DNA
ctctcctggagctacgaact

SEQ ID NO: 1020 - DNA, 20 bp, synthetic construct
  misc_feature 1..20: note = Synthetic oligonucleotide
  source 1..20: mol_type = other DNA
gtgaggtaacgtgatcctgg

SEQ ID NO: 1021 - DNA, 20 bp, synthetic construct
  misc_feature 1..20: note = Synthetic oligonucleotide
  source 1..20: mol_type = other DNA
tttggtgaggtaacgtgatc

SEQ ID NO: 1022 - DNA, 20 bp, synthetic construct
  misc_feature 1..20: note = Synthetic oligonucleotide
  source 1..20: mol_type = other DNA
cctgacttcccgacctgagc

SEQ ID NO: 1023 - DNA, 20 bp, synthetic construct
  misc_feature 1..20: note = Synthetic oligonucleotide
  source 1..20: mol_type = other DNA
ctttcaagtcaagctgcttg

SEQ ID NO: 1024 - DNA, 20 bp, synthetic construct
  misc_feature 1..20: note = Synthetic oligonucleotide
  source 1..20: mol_type = other DNA
cctttaaaaaggaacacaaa

SEQ ID NO: 1025 - DNA, 20 bp, synthetic construct
  misc_feature 1..20: note = Synthetic oligonucleotide
  source 1..20: mol_type = other DNA
gtacacttcgccactaaaaa

SEQ ID NO: 1026 - DNA, 20 bp, synthetic construct
  misc_feature 1..20: note = Synthetic oligonucleotide
  source 1..20: mol_type = other DNA
ccagatactccccagtgtct

SEQ ID NO: 1027 - DNA, 20 bp, synthetic construct
  misc_feature 1..20: note = Synthetic oligonucleotide
  source 1..20: mol_type = other DNA
gatgacgatgcaacactcag

SEQ ID NO: 1028 - DNA, 20 bp, synthetic construct
  misc_feature 1..20: note = Synthetic oligonucleotide
  source 1..20: mol_type = other DNA
cagatgacgatgcaacactc

SEQ ID NO: 1029 - DNA, 20 bp, synthetic construct
  misc_feature 1..20: note = Synthetic oligonucleotide
  source 1..20: mol_type = other DNA
gcgatgccgtctcctgacag

SEQ ID NO: 1030 - DNA, 20 bp, synthetic construct
  misc_feature 1..20: note = Synthetic oligonucleotide
  source 1..20: mol_type = other DNA
gcagaaaaggcttacaacac

SEQ ID NO: 1031 - DNA, 20 bp, synthetic construct
  misc_feature 1..20: note = Synthetic oligonucleotide
  source 1..20: mol_type = other DNA
agaaagatccttctccaagt

SEQ ID NO: 1032 - DNA, 20 bp, synthetic construct
  misc_feature 1..20: note = Synthetic oligonucleotide
  source 1..20: mol_type = other DNA
atcattctgagcaaactatc

SEQ ID NO: 1033 - DNA, 20 bp, synthetic construct
  misc_feature 1..20: note = Synthetic oligonucleotide
  source 1..20: mol_type = other DNA
gaacatttttagtttcttgt

SEQ ID NO: 1034 - DNA, 20 bp, synthetic construct
  misc_feature 1..20: note = Synthetic oligonucleotide
  source 1..20: mol_type = other DNA
ccatcagtcaccggagcctg

SEQ ID NO: 1035 - DNA, 20 bp, synthetic construct
  misc_feature 1..20: note = Synthetic oligonucleotide
  source 1..20: mol_type = other DNA
gactctaaagcggcactgcc

SEQ ID NO: 1036 - DNA, 20 bp, synthetic construct
  misc_feature 1..20: note = Synthetic oligonucleotide
  source 1..20: mol_type = other DNA
gaattccgacaagacaggtc

SEQ ID NO: 1037 - DNA, 20 bp, synthetic construct
  misc_feature 1..20: note = Synthetic oligonucleotide
  source 1..20: mol_type = other DNA
gcatgtgttcggatgaagtc

SEQ ID NO: 1038 - DNA, 20 bp, synthetic construct
  misc_feature 1..20: note = Synthetic oligonucleotide
  source 1..20: mol_type = other DNA
cgcacagcgtcccccctctc

SEQ ID NO: 1039 - DNA, 20 bp, synthetic construct
  misc_feature 1..20: note = Synthetic oligonucleotide
  source 1..20: mol_type = other DNA
aagggatcttcacgggcaca

SEQ ID NO: 1040 - DNA, 20 bp, synthetic construct
  misc_feature 1..20: note = Synthetic oligonucleotide
  source 1..20: mol_type = other DNA
attgcctcggtaagtgatgg

SEQ ID NO: 1041 - DNA, 20 bp, synthetic construct
  misc_feature 1..20: note = Synthetic oligonucleotide
  source 1..20: mol_type = other DNA
gggtttcaattgcctcggta

SEQ ID NO: 1042 - DNA, 20 bp, synthetic construct
  misc_feature 1..20: note = Synthetic oligonucleotide
  source 1..20: mol_type = other DNA
atctcaataatctatcactg

SEQ ID NO: 1043 - DNA, 20 bp, synthetic construct
  misc_feature 1..20: note = Synthetic oligonucleotide
  source 1..20: mol_type = other DNA
gtctgatcaaccgacagccc

SEQ ID NO: 1044 - DNA, 20 bp, synthetic construct
  misc_feature 1..20: note = Synthetic oligonucleotide
  source 1..20: mol_type = other DNA
ggtcacgtagtatcttactt

SEQ ID NO: 1045 - DNA, 20 bp, synthetic construct
  misc_feature 1..20: note = Synthetic oligonucleotide
  source 1..20: mol_type = other DNA
caggtcacgtagtatcttac

SEQ ID NO: 1046 - DNA, 20 bp, synthetic construct
  misc_feature 1..20: note = Synthetic oligonucleotide
  source 1..20: mol_type = other DNA
agtgatccttccacctcagt

SEQ ID NO: 1047 - DNA, 20 bp, synthetic construct
  misc_feature 1..20: note = Synthetic oligonucleotide
  source 1..20: mol_type = other DNA
ccctagactggcgatacatt

SEQ ID NO: 1048 - DNA, 20 bp, synthetic construct
  misc_feature 1..20: note = Synthetic oligonucleotide
  source 1..20: mol_type = other DNA
tgagagccctagactggcga

SEQ ID NO: 1049 - DNA, 20 bp, synthetic construct
  misc_feature 1..20: note = Synthetic oligonucleotide
  source 1..20: mol_type = other DNA
gccacacggtattatcctaa

SEQ ID NO: 1050 - DNA, 20 bp, synthetic construct
  misc_feature 1..20: note = Synthetic oligonucleotide
  source 1..20: mol_type = other DNA
gccccacaatcacttctcta

SEQ ID NO: 1051 - DNA, 20 bp, synthetic construct
  misc_feature 1..20: note = Synthetic oligonucleotide
  source 1..20: mol_type = other DNA
tgagaagaaattttataact

SEQ ID NO: 1052 - DNA, 20 bp, synthetic construct
  misc_feature 1..20: note = Synthetic oligonucleotide
  source 1..20: mol_type = other DNA
ccatcttgaagggcggaacc

SEQ ID NO: 1053 - DNA, 20 bp, synthetic construct
  misc_feature 1..20: note = Synthetic oligonucleotide
  source 1..20: mol_type = other DNA
ctgtcggttgagcaatagtg

SEQ ID NO: 1054 - DNA, 20 bp, synthetic construct
  misc_feature 1..20: note = Synthetic oligonucleotide
  source 1..20: mol_type = other DNA
cttgcgattttgctccaggt

SEQ ID NO: 1055 - DNA, 20 bp, synthetic construct
  misc_feature 1..20: note = Synthetic oligonucleotide
  source 1..20: mol_type = other DNA
tgagcgtccagtctgaccac

SEQ ID NO: 1056 - DNA, 20 bp, synthetic construct
  misc_feature 1..20: note = Synthetic oligonucleotide
  source 1..20: mol_type = other DNA
gggacaacggctaagttcag

SEQ ID NO: 1057 - DNA, 20 bp, synthetic construct
  misc_feature 1..20: note = Synthetic oligonucleotide
  source 1..20: mol_type = other DNA
tggccatgagatttgcatac

SEQ ID NO: 1058 - DNA, 20 bp, synthetic construct
  misc_feature 1..20: note = Synthetic oligonucleotide
  source 1..20: mol_type = other DNA
tacggatgtgttttggccag

SEQ ID NO: 1059 - DNA, 20 bp, synthetic construct
  misc_feature 1..20: note = Synthetic oligonucleotide
  source 1..20: mol_type = other DNA
gagagccggtataaactaca

SEQ ID NO: 1060 - DNA, 20 bp, synthetic construct
  misc_feature 1..20: note = Synthetic oligonucleotide
  source 1..20: mol_type = other DNA
gtgagagagccggtataaac

SEQ ID NO: 1061 - DNA, 20 bp, synthetic construct
  misc_feature 1..20: note = Synthetic oligonucleotide
  source 1..20: mol_type = other DNA
ttatacatctcacgaccaag

SEQ ID NO: 1062 - DNA, 20 bp, synthetic construct
  misc_feature 1..20: note = Synthetic oligonucleotide
  source 1..20: mol_type = other DNA
tctctgaaaataagctattc

SEQ ID NO: 1063 - DNA, 20 bp, synthetic construct
  misc_feature 1..20: note = Synthetic oligonucleotide
  source 1..20: mol_type = other DNA
tcttcgttattatgctgaac

SEQ ID NO: 1064 - DNA, 20 bp, synthetic construct
  misc_feature 1..20: note = Synthetic oligonucleotide
  source 1..20: mol_type = other DNA
gccttcgccgaccagggcct

SEQ ID NO: 1065 - DNA, 20 bp, synthetic construct
  misc_feature 1..20: note = Synthetic oligonucleotide
  source 1..20: mol_type = other DNA
gagggggaacgcacagtggc

SEQ ID NO: 1066 - DNA, 20 bp, synthetic construct
  misc_feature 1..20: note = Synthetic oligonucleotide
  source 1..20: mol_type = other DNA
ggagggggaacgcacagtgg

SEQ ID NO: 1067 - DNA, 20 bp, synthetic construct
  misc_feature 1..20: note = Synthetic oligonucleotide
  source 1..20: mol_type = other DNA
ctaatgggtggcgatcacat

SEQ ID NO: 1068 - DNA, 20 bp, synthetic construct
  misc_feature 1..20: note = Synthetic oligonucleotide
  source 1..20: mol_type = other DNA
tcagtggtccaaatctcttt

SEQ ID NO: 1069 - DNA, 20 bp, synthetic construct
  misc_feature 1..20: note = Synthetic oligonucleotide
  source 1..20: mol_type = other DNA
ttaaatcagtggtccaaatc

SEQ ID NO: 1070 - DNA, 20 bp, synthetic construct
  misc_feature 1..20: note = Synthetic oligonucleotide
  source 1..20: mol_type = other DNA
gtctatgttgtagaattccc

SEQ ID NO: 1071 - DNA, 20 bp, synthetic construct
  misc_feature 1..20: note = Synthetic oligonucleotide
  source 1..20: mol_type = other DNA
gttgttatatgctttttacc

SEQ ID NO: 1072 - DNA, 20 bp, synthetic construct
  misc_feature 1..20: note = Synthetic oligonucleotide
  source 1..20: mol_type = other DNA
tattgccgcaggatatcaac

SEQ ID NO: 1073 - DNA, 20 bp, synthetic construct
  misc_feature 1..20: note = Synthetic oligonucleotide
  source 1..20: mol_type = other DNA
gagaggcgtttgcaagtgac

SEQ ID NO: 1074 - DNA, 20 bp, synthetic construct
  misc_feature 1..20: note = Synthetic oligonucleotide
  source 1..20: mol_type = other DNA
cttgtgtacggttcctaaga

SEQ ID NO: 1075 - DNA, 20 bp, synthetic construct
  misc_feature 1..20: note = Synthetic oligonucleotide
  source 1..20: mol_type = other DNA
aaccagaatattggaacaaa

SEQ ID NO: 1076 - DNA, 20 bp, synthetic construct
  misc_feature 1..20: note = Synthetic oligonucleotide
  source 1..20: mol_type = other DNA
gagccaaggtgtcgccaccg

SEQ ID NO: 1077 - DNA, 20 bp, synthetic construct
  misc_feature 1..20: note = Synthetic oligonucleotide
  source 1..20: mol_type = other DNA
gctggtgtgcacctgtagtc

SEQ ID NO: 1078 - DNA, 20 bp, synthetic construct
  misc_feature 1..20: note = Synthetic oligonucleotide
  source 1..20: mol_type = other DNA
caaaatacttaatgaggtgg

SEQ ID NO: 1079 - DNA, 20 bp, synthetic construct
  misc_feature 1..20: note = Synthetic oligonucleotide
  source 1..20: mol_type = other DNA
tcacagatatatccgtcttt

SEQ ID NO: 1080 - DNA, 20 bp, synthetic construct
  misc_feature 1..20: note = Synthetic oligonucleotide
  source 1..20: mol_type = other DNA
gtcacagatatatccgtctt

SEQ ID NO: 1081 - DNA, 20 bp, synthetic construct
  misc_feature 1..20: note = Synthetic oligonucleotide
  source 1..20: mol_type = other DNA
cactacggtgcgagtcagtc

SEQ ID NO: 1082 - DNA, 20 bp, synthetic construct
  misc_feature 1..20: note = Synthetic oligonucleotide
  source 1..20: mol_type = other DNA
gtattcgctggactaagtcc

SEQ ID NO: 1083 - DNA, 20 bp, synthetic construct
  misc_feature 1..20: note = Synthetic oligonucleotide
  source 1..20: mol_type = other DNA
tcctcaccgtaatgaccaca

SEQ ID NO: 1084 - DNA, 20 bp, synthetic construct
  misc_feature 1..20: note = Synthetic oligonucleotide
  source 1..20: mol_type = other DNA
gggggtacaagagcgggctc

SEQ ID NO: 1085 - DNA, 20 bp, synthetic construct
  misc_feature 1..20: note = Synthetic oligonucleotide
  source 1..20: mol_type = other DNA
actgaccggtctggcagtct

SEQ ID NO: 1086 - DNA, 20 bp, synthetic construct
  misc_feature 1..20: note = Synthetic oligonucleotide
  source 1..20: mol_type = other DNA
gctcctagaaacctgcgggt

SEQ ID NO: 1087 - DNA, 20 bp, synthetic construct
  misc_feature 1..20: note = Synthetic oligonucleotide
  source 1..20: mol_type = other DNA
ggacacacctgggggcaaca

SEQ ID NO: 1088 - DNA, 20 bp, synthetic construct
  misc_feature 1..20: note = Synthetic oligonucleotide
  source 1..20: mol_type = other DNA
tcccagggcgctatctgagc

SEQ ID NO: 1089 - DNA, 20 bp, synthetic construct
  misc_feature 1..20: note = Synthetic oligonucleotide
  source 1..20: mol_type = other DNA
gaaggacaggtgggaaaccg

SEQ ID NO: 1090 - DNA, 20 bp, synthetic construct
  misc_feature 1..20: note = Synthetic oligonucleotide
  source 1..20: mol_type = other DNA
agccacggaccttctctgca

SEQ ID NO: 1091 - DNA, 20 bp, synthetic construct
  misc_feature 1..20: note = Synthetic oligonucleotide
  source 1..20: mol_type = other DNA
cacgacagtgcggaagaaca

SEQ ID NO: 1092 - DNA, 20 bp, synthetic construct
  misc_feature 1..20: note = Synthetic oligonucleotide
  source 1..20: mol_type = other DNA
ttcagggtggtccatgtcac

SEQ ID NO: 1093 - DNA, 20 bp, synthetic construct
  misc_feature 1..20: note = Synthetic oligonucleotide
  source 1..20: mol_type = other DNA
ggtgcctcactagccctagc

SEQ ID NO: 1094 - DNA, 20 bp, synthetic construct
  misc_feature 1..20: note = Synthetic oligonucleotide
  source 1..20: mol_type = other DNA
tcggtcctcaccgtgacggc

SEQ ID NO: 1095 - DNA, 20 bp, synthetic construct
  misc_feature 1..20: note = Synthetic oligonucleotide
  source 1..20: mol_type = other DNA
tcccacttcacataaatata

SEQ ID NO: 1096 - DNA, 20 bp, synthetic construct
  misc_feature 1..20: note = Synthetic oligonucleotide
  source 1..20: mol_type = other DNA
catcagacatcgttttggac

SEQ ID NO: 1097 - DNA, 20 bp, synthetic construct
  misc_feature 1..20: note = Synthetic oligonucleotide
  source 1..20: mol_type = other DNA
taacacccacgcatggctgc

SEQ ID NO: 1098 - DNA, 20 bp, synthetic construct
  misc_feature 1..20: note = Synthetic oligonucleotide
  source 1..20: mol_type = other DNA
catagaccagagcgccagtt

SEQ ID NO: 1099 - DNA, 20 bp, synthetic construct
  misc_feature 1..20: note = Synthetic oligonucleotide
  source 1..20: mol_type = other DNA
ctaccatagaccagagcgcc

SEQ ID NO: 1100 - DNA, 20 bp, synthetic construct
  misc_feature 1..20: note = Synthetic oligonucleotide
  source 1..20: mol_type = other DNA
cctgtgcctataatcctgtc

SEQ ID NO: 1101 - DNA, 20 bp, synthetic construct
  misc_feature 1..20: note = Synthetic oligonucleotide
  source 1..20: mol_type = other DNA
ctgaaaccgtattactttac

SEQ ID NO: 1102 - DNA, 20 bp, synthetic construct
  misc_feature 1..20: note = Synthetic oligonucleotide
  source 1..20: mol_type = other DNA
actgagatgaggtcttgctc

SEQ ID NO: 1103 - DNA, 20 bp, synthetic construct
  misc_feature 1..20: note = Synthetic oligonucleotide
  source 1..20: mol_type = other DNA
gacggggtttcactgtgttc

SEQ ID NO: 1104 - DNA, 20 bp, synthetic construct
  misc_feature 1..20: note = Synthetic oligonucleotide
  source 1..20: mol_type = other DNA
gctagaggcctgaggcactg

SEQ ID NO: 1105 - DNA, 20 bp, synthetic construct
  misc_feature 1..20: note = Synthetic oligonucleotide
  source 1..20: mol_type = other DNA
ctgcacaaggcggtggaagt

SEQ ID NO: 1106 - DNA, 20 bp, synthetic construct
  misc_feature 1..20: note = Synthetic oligonucleotide
  source 1..20: mol_type = other DNA
gcccaaattcaatccgtggc

SEQ ID NO: 1107 - DNA, 20 bp, synthetic construct
  misc_feature 1..20: note = Synthetic oligonucleotide
  source 1..20: mol_type = other DNA
tctgatcttctgtgtatctg

SEQ ID NO: 1108 - DNA, 20 bp, synthetic construct
  misc_feature 1..20: note = Synthetic oligonucleotide
  source 1..20: mol_type = other DNA
gctccagactttaggtaagg

SEQ ID NO: 1109 - DNA, 20 bp, synthetic construct
  misc_feature 1..20: note = Synthetic oligonucleotide
  source 1..20: mol_type = other DNA
tcttgggtagggattcgcaa

SEQ ID NO: 1110 - DNA, 20 bp, synthetic construct
  misc_feature 1..20: note = Synthetic oligonucleotide
  source 1..20: mol_type = other DNA
gcttgtatgcgcttgccctc

SEQ ID NO: 1111 - DNA, 20 bp, synthetic construct
  misc_feature 1..20: note = Synthetic oligonucleotide
  source 1..20: mol_type = other DNA
cctacttgggagtcagtgtg

SEQ ID NO: 1112 - DNA, 20 bp, synthetic construct
  misc_feature 1..20: note = Synthetic oligonucleotide
  source 1..20: mol_type = other DNA
ccgccttgtgcgcacgttct

SEQ ID NO: 1113 - DNA, 20 bp, synthetic construct
  misc_feature 1..20: note = Synthetic oligonucleotide
  source 1..20: mol_type = other DNA
gggtcatcagcgaaaggggc

SEQ ID NO: 1114 - DNA, 20 bp, synthetic construct
  misc_feature 1..20: note = Synthetic oligonucleotide
  source 1..20: mol_type = other DNA
tcttttgtgaagtgtctgtt

SEQ ID NO: 1115 - DNA, 20 bp, synthetic construct
  misc_feature 1..20: note = Synthetic oligonucleotide
  source 1..20: mol_type = other DNA
cagaccatacaaggtcgtcc

SEQ ID NO: 1116 - DNA, 20 bp, synthetic construct
  misc_feature 1..20: note = Synthetic oligonucleotide
  source 1..20: mol_type = other DNA
ttggcttcatttgaactccc

SEQ ID NO: 1117 - DNA, 20 bp, synthetic construct
  misc_feature 1..20: note = Synthetic oligonucleotide
  source 1..20: mol_type = other DNA
atcaggcagggagcttgcag

SEQ ID NO: 1118 - DNA, 20 bp, synthetic construct
  misc_feature 1..20: note = Synthetic oligonucleotide
  source 1..20: mol_type = other DNA
ggcactccccacatctcaga

SEQ ID NO: 1119 - DNA, 20 bp, synthetic construct
  misc_feature 1..20: note = Synthetic oligonucleotide
  source 1..20: mol_type = other DNA
cacctcccagacagggttgc

SEQ ID NO: 1120 - DNA, 20 bp, synthetic construct
  misc_feature 1..20: note = Synthetic oligonucleotide
  source 1..20: mol_type = other DNA
cccagacggggtggcggcca

SEQ ID NO: 1121 - DNA, 20 bp, synthetic construct
  misc_feature 1..20: note = Synthetic oligonucleotide
  source 1..20: mol_type = other DNA
agagagcacccggttggggg

SEQ ID NO: 1122 - DNA, 20 bp, synthetic construct
  misc_feature 1..20: note = Synthetic oligonucleotide
  source 1..20: mol_type = other DNA
tttatttatttattttattt

SEQ ID NO: 1123 - DNA, 20 bp, synthetic construct
  misc_feature 1..20: note = Synthetic oligonucleotide
  source 1..20: mol_type = other DNA
gtttccgacttttagcccaa

SEQ ID NO: 1124 - DNA, 20 bp, synthetic construct
  misc_feature 1..20: note = Synthetic oligonucleotide
  source 1..20: mol_type = other DNA
ccacatgcactgcactgctc

SEQ ID NO: 1125 - DNA, 20 bp, synthetic construct
  misc_feature 1..20: note = Synthetic oligonucleotide
  source 1..20: mol_type = other DNA
ggtacttcctcgcatacgct

SEQ ID NO: 1126 - DNA, 20 bp, synthetic construct
  misc_feature 1..20: note = Synthetic oligonucleotide
  source 1..20: mol_type = other DNA
cagaggtagggttttgccat

SEQ ID NO: 1127 - DNA, 20 bp, synthetic construct
  misc_feature 1..20: note = Synthetic oligonucleotide
  source 1..20: mol_type = other DNA
tccttcaccaactctaaaat

SEQ ID NO: 1128 - DNA, 20 bp, synthetic construct
  misc_feature 1..20: note = Synthetic oligonucleotide
  source 1..20: mol_type = other DNA
gtgctcaaatgttcgtcctg

SEQ ID NO: 1129 - DNA, 20 bp, synthetic construct
  misc_feature 1..20: note = Synthetic oligonucleotide
  source 1..20: mol_type = other DNA
taaatgcctaggacattcca

SEQ ID NO: 1130 - DNA, 20 bp, synthetic construct
  misc_feature 1..20: note = Synthetic oligonucleotide
  source 1..20: mol_type = other DNA
aaggtggacagccagtctcc

SEQ ID NO: 1131 - DNA, 20 bp, synthetic construct
  misc_feature 1..20: note = Synthetic oligonucleotide
  source 1..20: mol_type = other DNA
aacggcagccagggtatcaa

SEQ ID NO: 1132 - DNA, 20 bp, synthetic construct
  misc_feature 1..20: note = Synthetic oligonucleotide
  source 1..20: mol_type = other DNA
gtccaacggcagccagggta

SEQ ID NO: 1133 - DNA, 20 bp, synthetic construct
  misc_feature 1..20: note = Synthetic oligonucleotide
  source 1..20: mol_type = other DNA
gacttggagtttgggcatgg

SEQ ID NO: 1134 - DNA, 20 bp, synthetic construct
  misc_feature 1..20: note = Synthetic oligonucleotide
  source 1..20: mol_type = other DNA
agaagttagtaaatagtgaa

SEQ ID NO: 1135 - DNA, 20 bp, synthetic construct
  misc_feature 1..20: note = Synthetic oligonucleotide
  source 1..20: mol_type = other DNA
aacaaactagagggaagtct

SEQ ID NO: 1136 - DNA, 20 bp, synthetic construct
  misc_feature 1..20: note = Synthetic oligonucleotide
  source 1..20: mol_type = other DNA
agaaccagcagaaccttttc

SEQ ID NO: 1137 - DNA, 20 bp, synthetic construct
  misc_feature 1..20: note = Synthetic oligonucleotide
  source 1..20: mol_type = other DNA
gtctcctgggtagctggaat

SEQ ID NO: 1138 - DNA, 20 bp, synthetic construct
  misc_feature 1..20: note = Synthetic oligonucleotide
  source 1..20: mol_type = other DNA
gattctgcaagcttaggtta

SEQ ID NO: 1139 - DNA, 20 bp, synthetic construct
  misc_feature 1..20: note = Synthetic oligonucleotide
  source 1..20: mol_type = other DNA
agattctgcaagcttaggtt

SEQ ID NO: 1140 - DNA, 20 bp, synthetic construct
  misc_feature 1..20: note = Synthetic oligonucleotide
  source 1..20: mol_type = other DNA
aattctagcttttgcaaagg

SEQ ID NO: 1141 - DNA, 20 bp, synthetic construct
  misc_feature 1..20: note = Synthetic oligonucleotide
  source 1..20: mol_type = other DNA
atttttcccattgaaaggaa

SEQ ID NO: 1142 - DNA, 20 bp, synthetic construct
  misc_feature 1..20: note = Synthetic oligonucleotide
  source 1..20: mol_type = other DNA
tgaaaacttcgtgcggacca

SEQ ID NO: 1143 - DNA, 20 bp, synthetic construct
  misc_feature 1..20: note = Synthetic oligonucleotide
  source 1..20: mol_type = other DNA
cccagacagcaattagtaca

SEQ ID NO: 1144 - DNA, 20 bp, synthetic construct
  misc_feature 1..20: note = Synthetic oligonucleotide
  source 1..20: mol_type = other DNA
gtgagactgcaatcgggtcc

SEQ ID NO: 1145 - DNA, 20 bp, synthetic construct
  misc_feature 1..20: note = Synthetic oligonucleotide
  source 1..20: mol_type = other DNA
tttcatgttgtccgtcactt

SEQ ID NO: 1146 - DNA, 20 bp, synthetic construct
  misc_feature 1..20: note = Synthetic oligonucleotide
  source 1..20: mol_type = other DNA
ctatcctgttgcgagtttta

SEQ ID NO: 1147 - DNA, 20 bp, synthetic construct
  misc_feature 1..20: note = Synthetic oligonucleotide
  source 1..20: mol_type = other DNA
gtttcacggaagagctatta

SEQ ID NO: 1148 - DNA, 20 bp, synthetic construct
  misc_feature 1..20: note = Synthetic oligonucleotide
  source 1..20: mol_type = other DNA
cttttctaagagtgtatagg

SEQ ID NO: 1149 - DNA, 20 bp, synthetic construct
  misc_feature 1..20: note = Synthetic oligonucleotide
  source 1..20: mol_type = other DNA
gctctacccagctatatgcc

SEQ ID NO: 1150 - DNA, 20 bp, synthetic construct
  misc_feature 1..20: note = Synthetic oligonucleotide
  source 1..20: mol_type = other DNA
gggtaaacaggtttgcatca

SEQ ID NO: 1151 - DNA, 20 bp, synthetic construct
  misc_feature 1..20: note = Synthetic oligonucleotide
  source 1..20: mol_type = other DNA
ccagctacgctcagtggtct

SEQ ID NO: 1152 - DNA, 20 bp, synthetic construct
  misc_feature 1..20: note = Synthetic oligonucleotide
  source 1..20: mol_type = other DNA
ttttaaagtattttataata

SEQ ID NO: 1153 - DNA, 20 bp, synthetic construct
  misc_feature 1..20: note = Synthetic oligonucleotide
  source 1..20: mol_type = other DNA
tgcaagagtacgcttcagct

SEQ ID NO: 1154 - DNA, 20 bp, synthetic construct
  misc_feature 1..20: note = Synthetic oligonucleotide
  source 1..20: mol_type = other DNA
tcatactactgcactataac

SEQ ID NO: 1155 - DNA, 20 bp, synthetic construct
  misc_feature 1..20: note = Synthetic oligonucleotide
  source 1..20: mol_type = other DNA
tacattgtgtcaggtggatg

SEQ ID NO: 1156 - DNA, 20 bp, synthetic construct
  misc_feature 1..20: note = Synthetic oligonucleotide
  source 1..20: mol_type = other DNA
cttctagaccattaggcctg

SEQ ID NO: 1157 - DNA, 20 bp, synthetic construct
  misc_feature 1..20: note = Synthetic oligonucleotide
  source 1..20: mol_type = other DNA
ctcctgtagtctatcttcaa

SEQ ID NO: 1158 - DNA, 20 bp, synthetic construct
  misc_feature 1..20: note = Synthetic oligonucleotide
  source 1..20: mol_type = other DNA
actcaccccagtacgacacc

SEQ ID NO: 1159 - DNA, 20 bp, synthetic construct
  misc_feature 1..20: note = Synthetic oligonucleotide
  source 1..20: mol_type = other DNA
agaactcaccccagtacgac

SEQ ID NO: 1160 - DNA, 20 bp, synthetic construct
  misc_feature 1..20: note = Synthetic oligonucleotide
  source 1..20: mol_type = other DNA
ggcacgtatctgatggactc

SEQ ID NO: 1161 - DNA, 20 bp, synthetic construct
  misc_feature 1..20: note = Synthetic oligonucleotide
  source 1..20: mol_type = other DNA
aacaaagcacgaccagccta

SEQ ID NO: 1162 - DNA, 20 bp, synthetic construct
  misc_feature 1..20: note = Synthetic oligonucleotide
  source 1..20: mol_type = other DNA
tactagaaacgggcagtgtg

SEQ ID NO: 1163 - DNA, 20 bp, synthetic construct
  misc_feature 1..20: note = Synthetic oligonucleotide
  source 1..20: mol_type = other DNA
ttcttctcccaagtgagggg

SEQ ID NO: 1164 - DNA, 20 bp, synthetic construct
  misc_feature 1..20: note = Synthetic oligonucleotide
  source 1..20: mol_type = other DNA
gccaagagccgaacaacaca

SEQ ID NO: 1165 - DNA, 20 bp, synthetic construct
  misc_feature 1..20: note = Synthetic oligonucleotide
  source 1..20: mol_type = other DNA
aacttaaaagtataataata

SEQ ID NO: 1166 - DNA, 20 bp, synthetic construct
  misc_feature 1..20: note = Synthetic oligonucleotide
  source 1..20: mol_type = other DNA
acctgcacgttttgcacatg

SEQ ID NO: 1167 - DNA, 20 bp, synthetic construct
  misc_feature 1..20: note = Synthetic oligonucleotide
  source 1..20: mol_type = other DNA
acactgttgatgggagtcta

SEQ ID NO: 1168 - DNA, 20 bp, synthetic construct
  misc_feature 1..20: note = Synthetic oligonucleotide
  source 1..20: mol_type = other DNA
gacacttctcaaaagaagac

SEQ ID NO: 1169 - DNA, 20 bp, synthetic construct
  misc_feature 1..20: note = Synthetic oligonucleotide
  source 1..20: mol_type = other DNA
cagacacttctcaaaagaag

SEQ ID NO: 1170 - DNA, 20 bp, synthetic construct
  misc_feature 1..20: note = Synthetic oligonucleotide
  source 1..20: mol_type = other DNA
tacaaagaacttaaacaaat

SEQ ID NO: 1171 - DNA, 20 bp, synthetic construct
  misc_feature 1..20: note = Synthetic oligonucleotide
  source 1..20: mol_type = other DNA
atcagagtgagcaggcaact

SEQ ID NO: 1172 - DNA, 20 bp, synthetic construct
  misc_feature 1..20: note = Synthetic oligonucleotide
  source 1..20: mol_type = other DNA
ggcataggcatgggcaaaga

SEQ ID NO: 1173 - DNA, 20 bp, synthetic construct
  misc_feature 1..20: note = Synthetic oligonucleotide
  source 1..20: mol_type = other DNA
gcagtggggaaaggattccc

SEQ ID NO: 1174 - DNA, 20 bp, synthetic construct
  misc_feature 1..20: note = Synthetic oligonucleotide
  source 1..20: mol_type = other DNA
gaaaatggccatactcccca

SEQ ID NO: 1175 - DNA, 20 bp, synthetic construct
  misc_feature 1..20: note = Synthetic oligonucleotide
  source 1..20: mol_type = other DNA
tttggaaaaccccaacattt

SEQ ID NO: 1176 - DNA, 20 bp, synthetic construct
  misc_feature 1..20: note = Synthetic oligonucleotide
  source 1..20: mol_type = other DNA
gcacaagacaaggatgctct

SEQ ID NO: 1177 - DNA, 20 bp, synthetic construct
  misc_feature 1..20: note = Synthetic oligonucleotide
  source 1..20: mol_type = other DNA
acactggcaaactgaatcca

SEQ ID NO: 1178 - DNA, 20 bp, synthetic construct
  misc_feature 1..20: note = Synthetic oligonucleotide
  source 1..20: mol_type = other DNA
aaatgtccaggaccagatgg

SEQ ID NO: 1179 - DNA, 20 bp, synthetic construct
  misc_feature 1..20: note = Synthetic oligonucleotide
  source 1..20: mol_type = other DNA
ctctactcaaataaactaga

SEQ ID NO: 1180 - DNA, 20 bp, synthetic construct
  misc_feature 1..20: note = Synthetic oligonucleotide
  source 1..20: mol_type = other DNA
agatcaccactgatcccaca

SEQ ID NO: 1181 - DNA, 20 bp, synthetic construct
  misc_feature 1..20: note = Synthetic oligonucleotide
  source 1..20: mol_type = other DNA
ctagagaagcaagagcaaac

SEQ ID NO: 1182 - DNA, 20 bp, synthetic construct
  misc_feature 1..20: note = Synthetic oligonucleotide
  source 1..20: mol_type = other DNA
gaactagagaagcaagagca

SEQ ID NO: 1183 - DNA, 20 bp, synthetic construct
  misc_feature 1..20: note = Synthetic oligonucleotide
  source 1..20: mol_type = other DNA
aacaatgacacagtgtaccc

SEQ ID NO: 1184 - DNA, 20 bp, synthetic construct
  misc_feature 1..20: note = Synthetic oligonucleotide
  source 1..20: mol_type = other DNA
actctccaccccaaatcaac

SEQ ID NO: 1185 - DNA, 20 bp, synthetic construct
  misc_feature 1..20: note = Synthetic oligonucleotide
  source 1..20: mol_type = other DNA
tgtgctgtattcaggagaca

SEQ ID NO: 1186 - DNA, 20 bp, synthetic construct
  misc_feature 1..20: note = Synthetic oligonucleotide
  source 1..20: mol_type = other DNA
ggaaaaagcggtaccagcca

SEQ ID NO: 1187 - DNA, 20 bp, synthetic construct
  misc_feature 1..20: note = Synthetic oligonucleotide
  source 1..20: mol_type = other DNA
atggtcagattcacggaggt

SEQ ID NO: 1188 - DNA, 20 bp, synthetic construct
  misc_feature 1..20: note = Synthetic oligonucleotide
  source 1..20: mol_type = other DNA
tggatcaatcaagcagaaga

SEQ ID NO: 1189 - DNA, 20 bp, synthetic construct
  misc_feature 1..20: note = Synthetic oligonucleotide
  source 1..20: mol_type = other DNA
ggtgaattgctaactagaat

SEQ ID NO: 1190 - DNA, 20 bp, synthetic construct
  misc_feature 1..20: note = Synthetic oligonucleotide
  source 1..20: mol_type = other DNA
gagctctggctggaatctgg

SEQ ID NO: 1191 - DNA, 20 bp, synthetic construct
  misc_feature 1..20: note = Synthetic oligonucleotide
  source 1..20: mol_type = other DNA
aggggcggctgtaggcacag

SEQ ID NO: 1192 - DNA, 20 bp, synthetic construct
  misc_feature 1..20: note = Synthetic oligonucleotide
  source 1..20: mol_type = other DNA
cgacctgggacgtttgaggt

SEQ ID NO: 1193 - DNA, 20 bp, synthetic construct
  misc_feature 1..20: note = Synthetic oligonucleotide
  source 1..20: mol_type = other DNA
ggggtgttgccttactcggg

SEQ ID NO: 1194 - DNA, 20 bp, synthetic construct
  misc_feature 1..20: note = Synthetic oligonucleotide
  source 1..20: mol_type = other DNA
gcttatgattacacgtgttg

SEQ ID NO: 1195 - DNA, 20 bp, synthetic construct
  misc_feature 1..20: note = Synthetic oligonucleotide
  source 1..20: mol_type = other DNA
gccaggtgtcatgaaaaaaa

SEQ ID NO: 1196 - DNA, 20 bp, synthetic construct
  misc_feature 1..20: note = Synthetic oligonucleotide
  source 1..20: mol_type = other DNA
gaggcaggtcgttggattca

SEQ ID NO: 1197 - DNA, 20 bp, synthetic construct
  misc_feature 1..20: note = Synthetic oligonucleotide
  source 1..20: mol_type = other DNA
aaagtgttcacgacaatcac

SEQ ID NO: 1198 - DNA, 20 bp, synthetic construct
  misc_feature 1..20: note = Synthetic oligonucleotide
  source 1..20: mol_type = other DNA
aaacatacggtttcagactg

SEQ ID NO: 1199 - DNA, 20 bp, synthetic construct
  misc_feature 1..20: note = Synthetic oligonucleotide
  source 1..20: mol_type = other DNA
gataaaacatacggtttcag

SEQ ID NO: 1200 - DNA, 20 bp, synthetic construct
  misc_feature 1..20: note = Synthetic oligonucleotide
  source 1..20: mol_type = other DNA
acaaaacttaatgcactcat

SEQ ID NO: 1201 - DNA, 20 bp, synthetic construct
  misc_feature 1..20: note = Synthetic oligonucleotide
  source 1..20: mol_type = other DNA
aagagtgagttttggaacat

SEQ ID NO: 1202 - DNA, 20 bp, synthetic construct
  misc_feature 1..20: note = Synthetic oligonucleotide
  source 1..20: mol_type = other DNA
ggtgtacggcgtgtgagcgg

SEQ ID NO: 1203 - DNA, 20 bp, synthetic construct
  misc_feature 1..20: note = Synthetic oligonucleotide
  source 1..20: mol_type = other DNA
gggtggtgtacggcgtgtga

SEQ ID NO: 1204 - DNA, 20 bp, synthetic construct
  misc_feature 1..20: note = Synthetic oligonucleotide
  source 1..20: mol_type = other DNA
agttgaagaaaccctaaagg

SEQ ID NO: 1205 - DNA, 20 bp, synthetic construct
  misc_feature 1..20: note = Synthetic oligonucleotide
  source 1..20: mol_type = other DNA
gtgtaaacggcagttccatg

SEQ ID NO: 1206 - DNA, 20 bp, synthetic construct
  misc_feature 1..20: note = Synthetic oligonucleotide
  source 1..20: mol_type = other DNA
atgtgtaaacggcagttcca

SEQ ID NO: 1207 - DNA, 20 bp, synthetic construct
  misc_feature 1..20: note = Synthetic oligonucleotide
  source 1..20: mol_type = other DNA
cggctgccggtcatatgact

SEQ ID NO: 1208 - DNA, 20 bp, synthetic construct
  misc_feature 1..20: note = Synthetic oligonucleotide
  source 1..20: mol_type = other DNA
ccggctgccggtcatatgac

SEQ ID NO: 1209 - DNA, 20 bp, synthetic construct
  misc_feature 1..20: note = Synthetic oligonucleotide
  source 1..20: mol_type = other DNA
ctgctcggcgccggagccgc

SEQ ID NO: 1210 - DNA, 20 bp, synthetic construct
  misc_feature 1..20: note = Synthetic oligonucleotide
  source 1..20: mol_type = other DNA
gagtaactctgctcggcgcc

SEQ ID NO: 1211 - DNA, 20 bp, synthetic construct
  misc_feature 1..20: note = Synthetic oligonucleotide
  source 1..20: mol_type = other DNA
cgctgcgactgagtaactct

SEQ ID NO: 1212 - DNA, 20 bp, synthetic construct
  misc_feature 1..20: note = Synthetic oligonucleotide
  source 1..20: mol_type = other DNA
gccgctgcgactgagtaact

SEQ ID NO: 1213 - DNA, 20 bp, synthetic construct
  misc_feature 1..20: note = Synthetic oligonucleotide
  source 1..20: mol_type = other DNA
ggccgctgcgactgagtaac

SEQ ID NO: 1214 - DNA, 20 bp, synthetic construct
  misc_feature 1..20: note = Synthetic oligonucleotide
  source 1..20: mol_type = other DNA
ggccgcccagccttgcggga

SEQ ID NO: 1215 - DNA, 20 bp, synthetic construct
  misc_feature 1..20: note = Synthetic oligonucleotide
  source 1..20: mol_type = other DNA
cggccgcccagccttgcggg

SEQ ID NO: 1216 - DNA, 20 bp, synthetic construct
  misc_feature 1..20: note = Synthetic oligonucleotide
  source 1..20: mol_type = other DNA
cgcggccgcccagccttgcg

SEQ ID NO: 1217 - DNA, 20 bp, synthetic construct
  misc_feature 1..20: note = Synthetic oligonucleotide
  source 1..20: mol_type = other DNA
cgcggtggcggggccatcgc

SEQ ID NO: 1218 - DNA, 20 bp, synthetic construct
  misc_feature 1..20: note = Synthetic oligonucleotide
  source 1..20: mol_type = other DNA
ccgcggtggcggggccatcg

SEQ ID NO: 1219 - DNA, 20 bp, synthetic construct
  misc_feature 1..20: note = Synthetic oligonucleotide
  source 1..20: mol_type = other DNA
ggggccggcggctcagcgcg

SEQ ID NO: 1220 - DNA, 20 bp, synthetic construct
  misc_feature 1..20: note = Synthetic oligonucleotide
  source 1..20: mol_type = other DNA
tggcgctcggggggccggcg

SEQ ID NO: 1221 - DNA, 20 bp, synthetic construct
  misc_feature 1..20: note = Synthetic oligonucleotide
  source 1..20: mol_type = other DNA
gggccatgatgccgccgccg

SEQ ID NO: 1222 - DNA, 20 bp, synthetic construct
  misc_feature 1..20: note = Synthetic oligonucleotide
  source 1..20: mol_type = other DNA
ggggccatgatgccgccgcc

SEQ ID NO: 1223 - DNA, 20 bp, synthetic construct
  misc_feature 1..20: note = Synthetic oligonucleotide
  source 1..20: mol_type = other DNA
cggggccatgatgccgccgc

SEQ ID NO: 1224 - DNA, 20 bp, synthetic construct
  misc_feature 1..20: note = Synthetic oligonucleotide
  source 1..20: mol_type = other DNA
tcggggccatgatgccgccg

SEQ ID NO: 1225 - DNA, 20 bp, synthetic construct
  misc_feature 1..20: note = Synthetic oligonucleotide
  source 1..20: mol_type = other DNA
agacgccgccgcggagctgc

SEQ ID NO: 1226 - DNA, 20 bp, synthetic construct
  misc_feature 1..20: note = Synthetic oligonucleotide
  source 1..20: mol_type = other DNA
acctaaaggcgggtccttcc

SEQ ID NO: 1227 - DNA, 20 bp, synthetic construct
  misc_feature 1..20: note = Synthetic oligonucleotide
  source 1..20: mol_type = other DNA
cacctaaaggcgggtccttc

SEQ ID NO: 1228 - DNA, 20 bp, synthetic construct
  misc_feature 1..20: note = Synthetic oligonucleotide
  source 1..20: mol_type = other DNA
tcacctaaaggcgggtcctt

SEQ ID NO: 1229 - DNA, 20 bp, synthetic construct
  misc_feature 1..20: note = Synthetic oligonucleotide
  source 1..20: mol_type = other DNA
ctcacctaaaggcgggtcct

SEQ ID NO: 1230 - DNA, 20 bp, synthetic construct
  misc_feature 1..20: note = Synthetic oligonucleotide
  source 1..20: mol_type = other DNA
cctcacctaaaggcgggtcc

SEQ ID NO: 1231 - DNA, 20 bp, synthetic construct
  misc_feature 1..20: note = Synthetic oligonucleotide
  source 1..20: mol_type = other DNA
ccctcacctaaaggcgggtc

SEQ ID NO: 1232 - DNA, 20 bp, synthetic construct
  misc_feature 1..20: note = Synthetic oligonucleotide
  source 1..20: mol_type = other DNA
cccctcacctaaaggcgggt

SEQ ID NO: 1233 - DNA, 20 bp, synthetic construct
  misc_feature 1..20: note = Synthetic oligonucleotide
  source 1..20: mol_type = other DNA
tcaggcgaatctcattcagg

SEQ ID NO: 1234 - DNA, 20 bp, synthetic construct
  misc_feature 1..20: note = Synthetic oligonucleotide
  source 1..20: mol_type = other DNA
atcaggcgaatctcattcag

SEQ ID NO: 1235 - DNA, 20 bp, synthetic construct
  misc_feature 1..20: note = Synthetic oligonucleotide
  source 1..20: mol_type = other DNA
tatcaggcgaatctcattca

SEQ ID NO: 1236 - DNA, 20 bp, synthetic construct
  misc_feature 1..20: note = Synthetic oligonucleotide
  source 1..20: mol_type = other DNA
ctatcaggcgaatctcattc

SEQ ID NO: 1237 - DNA, 20 bp, synthetic construct
  misc_feature 1..20: note = Synthetic oligonucleotide
  source 1..20: mol_type = other DNA
actatcaggcgaatctcatt

SEQ ID NO: 1238 - DNA, 20 bp, synthetic construct
  misc_feature 1..20: note = Synthetic oligonucleotide
  source 1..20: mol_type = other DNA
aactatcaggcgaatctcat

SEQ ID NO: 1239 - DNA, 20 bp, synthetic construct
  misc_feature 1..20: note = Synthetic oligonucleotide
  source 1..20: mol_type = other DNA
aaactatcaggcgaatctca

SEQ ID NO: 1240 - DNA, 20 bp, synthetic construct
  misc_feature 1..20: note = Synthetic oligonucleotide
  source 1..20: mol_type = other DNA
taaactatcaggcgaatctc

SEQ ID NO: 1241 - DNA, 20 bp, synthetic construct
  misc_feature 1..20: note = Synthetic oligonucleotide
  source 1..20: mol_type = other DNA
gtaaactatcaggcgaatct

SEQ ID NO: 1242 - DNA, 20 bp, synthetic construct
  misc_feature 1..20: note = Synthetic oligonucleotide
  source 1..20: mol_type = other DNA
tcaatcttttgaacagcttt

SEQ ID NO: 1243 - DNA, 20 bp, synthetic construct
  misc_feature 1..20: note = Synthetic oligonucleotide
  source 1..20: mol_type = other DNA
tcccccagaagaactgtggg

SEQ ID NO: 1244 - DNA, 20 bp, synthetic construct
  misc_feature 1..20: note = Synthetic oligonucleotide
  source 1..20: mol_type = other DNA
gacatcggaagctggtcttg

SEQ ID NO: 1245 - DNA, 20 bp, synthetic construct
  misc_feature 1..20: note = Synthetic oligonucleotide
  source 1..20: mol_type = other DNA
tgacatcggaagctggtctt

SEQ ID NO: 1246 - DNA, 20 bp, synthetic construct
  misc_feature 1..20: note = Synthetic oligonucleotide
  source 1..20: mol_type = other DNA
ttgacatcggaagctggtct

SEQ ID NO: 1247 - DNA, 20 bp, synthetic construct
  misc_feature 1..20: note = Synthetic oligonucleotide
  source 1..20: mol_type = other DNA
tgttgacatcggaagctggt

SEQ ID NO: 1248 - DNA, 20 bp, synthetic construct
  misc_feature 1..20: note = Synthetic oligonucleotide
  source 1..20: mol_type = other DNA
atgttgacatcggaagctgg

SEQ ID NO: 1249 - DNA, 20 bp, synthetic construct
  misc_feature 1..20: note = Synthetic oligonucleotide
  source 1..20: mol_type = other DNA
catgttgacatcggaagctg

SEQ ID NO: 1250 - DNA, 20 bp, synthetic construct
  misc_feature 1..20: note = Synthetic oligonucleotide
  source 1..20: mol_type = other DNA
acatgttgacatcggaagct

SEQ ID NO: 1251 - DNA, 20 bp, synthetic construct
  misc_feature 1..20: note = Synthetic oligonucleotide
  source 1..20: mol_type = other DNA
taaggtggagcctttgtaac

SEQ ID NO: 1252 - DNA, 20 bp, synthetic construct
  misc_feature 1..20: note = Synthetic oligonucleotide
  source 1..20: mol_type = other DNA
agactcaccgtatgtagtgt

SEQ ID NO: 1253 - DNA, 20 bp, synthetic construct
  misc_feature 1..20: note = Synthetic oligonucleotide
  source 1..20: mol_type = other DNA
ccagactcaccgtatgtagt

SEQ ID NO: 1254 - DNA, 20 bp, synthetic construct
  misc_feature 1..20: note = Synthetic oligonucleotide
  source 1..20: mol_type = other DNA
tcctacacttacttatttgt

SEQ ID NO: 1255 - DNA, 20 bp, synthetic construct
  misc_feature 1..20: note = Synthetic oligonucleotide
  source 1..20: mol_type = other DNA
caagctatatccggagatgg

SEQ ID NO: 1256 - DNA, 20 bp, synthetic construct
  misc_feature 1..20: note = Synthetic oligonucleotide
  source 1..20: mol_type = other DNA
gcaagctatatccggagatg

SEQ ID NO: 1257 - DNA, 20 bp, synthetic construct
  misc_feature 1..20: note = Synthetic oligonucleotide
  source 1..20: mol_type = other DNA
ttgcaagctatatccggaga

SEQ ID NO: 1258 - DNA, 20 bp, synthetic construct
  misc_feature 1..20: note = Synthetic oligonucleotide
  source 1..20: mol_type = other DNA
cttgcaagctatatccggag

SEQ ID NO: 1259 - DNA, 20 bp, synthetic construct
  misc_feature 1..20: note = Synthetic oligonucleotide
  source 1..20: mol_type = other DNA
tcttgcaagctatatccgga

SEQ ID NO: 1260 - DNA, 20 bp, synthetic construct
  misc_feature 1..20: note = Synthetic oligonucleotide
  source 1..20: mol_type = other DNA
cagtacgacaaggacccaaa

SEQ ID NO: 1261 - DNA, 20 bp, synthetic construct
  misc_feature 1..20: note = Synthetic oligonucleotide
  source 1..20: mol_type = other DNA
tacctgatcgagcaatgcca

SEQ ID NO: 1262 - DNA, 20 bp, synthetic construct
  misc_feature 1..20: note = Synthetic oligonucleotide
  source 1..20: mol_type = other DNA
agtacctgatcgagcaatgc

SEQ ID NO: 1263 - DNA, 20 bp, synthetic construct
  misc_feature 1..20: note = Synthetic oligonucleotide
  source 1..20: mol_type = other DNA
aagtacctgatcgagcaatg

SEQ ID NO: 1264 - DNA, 20 bp, synthetic construct
  misc_feature 1..20: note = Synthetic oligonucleotide
  source 1..20: mol_type = other DNA
acaagtacctgatcgagcaa

SEQ ID NO: 1265 - DNA, 20 bp, synthetic construct
  misc_feature 1..20: note = Synthetic oligonucleotide
  source 1..20: mol_type = other DNA
caagctgaatgtctcatcag

SEQ ID NO: 1266 - DNA, 20 bp, synthetic construct
  misc_feature 1..20: note = Synthetic oligonucleotide
  source 1..20: mol_type = other DNA
ccaagctgaatgtctcatca

SEQ ID NO: 1267 - DNA, 20 bp, synthetic construct
  misc_feature 1..20: note = Synthetic oligonucleotide
  source 1..20: mol_type = other DNA
gccaagctgaatgtctcatc

SEQ ID NO: 1268 - DNA, 20 bp, synthetic construct
  misc_feature 1..20: note = Synthetic oligonucleotide
  source 1..20: mol_type = other DNA
agtgccggacatcatagtaa

SEQ ID NO: 1269 - DNA, 20 bp, synthetic construct
  misc_feature 1..20: note = Synthetic oligonucleotide
  source 1..20: mol_type = other DNA
aagtgccggacatcatagta

SEQ ID NO: 1270 - DNA, 20 bp, synthetic construct
  misc_feature 1..20: note = Synthetic oligonucleotide
  source 1..20: mol_type = other DNA
aaagtgccggacatcatagt

SEQ ID NO: 1271 - DNA, 20 bp, synthetic construct
  misc_feature 1..20: note = Synthetic oligonucleotide
  source 1..20: mol_type = other DNA
agagctggtttttttccaaa

SEQ ID NO: 1272 - DNA, 20 bp, synthetic construct
  misc_feature 1..20: note = Synthetic oligonucleotide
  source 1..20: mol_type = other DNA
cagagctggtttttttccaa

SEQ ID NO: 1273 - DNA, 20 bp, synthetic construct
  misc_feature 1..20: note = Synthetic oligonucleotide
  source 1..20: mol_type = other DNA
aacaccgcagtcagtaaggc

SEQ ID NO: 1274 - DNA, 20 bp, synthetic construct
  misc_feature 1..20: note = Synthetic oligonucleotide
  source 1..20: mol_type = other DNA
taacaccgcagtcagtaagg

SEQ ID NO: 1275 - DNA, 20 bp, synthetic construct
  misc_feature 1..20: note = Synthetic oligonucleotide
  source 1..20: mol_type = other DNA
ttaacaccgcagtcagtaag

SEQ ID NO: 1276 - DNA, 20 bp, synthetic construct
  misc_feature 1..20: note = Synthetic oligonucleotide
  source 1..20: mol_type = other DNA
gttaacaccgcagtcagtaa

SEQ ID NO: 1277 - DNA, 20 bp, synthetic construct
  misc_feature 1..20: note = Synthetic oligonucleotide
  source 1..20: mol_type = other DNA
ggttaacaccgcagtcagta

SEQ ID NO: 1278 - DNA, 20 bp, synthetic construct
  misc_feature 1..20: note = Synthetic oligonucleotide
  source 1..20: mol_type = other DNA
aggttaacaccgcagtcagt

SEQ ID NO: 1279 - DNA, 20 bp, synthetic construct
  misc_feature 1..20: note = Synthetic oligonucleotide
  source 1..20: mol_type = other DNA
taggttaacaccgcagtcag

SEQ ID NO: 1280 - DNA, 20 bp, synthetic construct
  misc_feature 1..20: note = Synthetic oligonucleotide
  source 1..20: mol_type = other DNA
gtaggttaacaccgcagtca

SEQ ID NO: 1281 - DNA, 20 bp, synthetic construct
  misc_feature 1..20: note = Synthetic oligonucleotide
  source 1..20: mol_type = other DNA
ggaggtacgtttctctgaga

SEQ ID NO: 1282 - DNA, 20 bp, synthetic construct
  misc_feature 1..20: note = Synthetic oligonucleotide
  source 1..20: mol_type = other DNA
atacggatgtgttttggcca

SEQ ID NO: 1283 - DNA, 20 bp, synthetic construct
  misc_feature 1..20: note = Synthetic oligonucleotide
  source 1..20: mol_type = other DNA
tatacggatgtgttttggcc

SEQ ID NO: 1284 - DNA, 20 bp, synthetic construct
  misc_feature 1..20: note = Synthetic oligonucleotide
  source 1..20: mol_type = other DNA
ttatacggatgtgttttggc

SEQ ID NO: 1285 - DNA, 20 bp, synthetic construct
  misc_feature 1..20: note = Synthetic oligonucleotide
  source 1..20: mol_type = other DNA
attatacggatgtgttttgg

SEQ ID NO: 1286 - DNA, 20 bp, synthetic construct
  misc_feature 1..20: note = Synthetic oligonucleotide
  source 1..20: mol_type = other DNA
agaggattatacggatgtgt

SEQ ID NO: 1287 - DNA, 20 bp, synthetic construct
  misc_feature 1..20: note = Synthetic oligonucleotide
  source 1..20: mol_type = other DNA
aagaggattatacggatgtg

SEQ ID NO: 1288 - DNA, 20 bp, synthetic construct
  misc_feature 1..20: note = Synthetic oligonucleotide
  source 1..20: mol_type = other DNA
aaagaggattatacggatgt

SEQ ID NO: 1289 - DNA, 20 bp, synthetic construct
  misc_feature 1..20: note = Synthetic oligonucleotide
  source 1..20: mol_type = other DNA
gctccgtaaagatcacctag

SEQ ID NO: 1290 - DNA, 20 bp, synthetic construct
  misc_feature 1..20: note = Synthetic oligonucleotide
  source 1..20: mol_type = other DNA
ggctccgtaaagatcaccta

SEQ ID NO: 1291 - DNA, 20 bp, synthetic construct
  misc_feature 1..20: note = Synthetic oligonucleotide
  source 1..20: mol_type = other DNA
tggctccgtaaagatcacct

SEQ ID NO: 1292 - DNA, 20 bp, synthetic construct
  misc_feature 1..20: note = Synthetic oligonucleotide
  source 1..20: mol_type = other DNA
atggctccgtaaagatcacc

SEQ ID NO: 1293 - DNA, 20 bp, synthetic construct
  misc_feature 1..20: note = Synthetic oligonucleotide
  source 1..20: mol_type = other DNA
tatggctccgtaaagatcac

SEQ ID NO: 1294 - DNA, 20 bp, synthetic construct
  misc_feature 1..20: note = Synthetic oligonucleotide
  source 1..20: mol_type = other DNA
ctatggctccgtaaagatca

SEQ ID NO: 1295 - DNA, 20 bp, synthetic construct
  misc_feature 1..20: note = Synthetic oligonucleotide
  source 1..20: mol_type = other DNA
cctatggctccgtaaagatc

SEQ ID NO: 1296 - DNA, 20 bp, synthetic construct
  misc_feature 1..20: note = Synthetic oligonucleotide
  source 1..20: mol_type = other DNA
cggtgcgagtcagtctcact

SEQ ID NO: 1297 - DNA, 20 bp, synthetic construct
  misc_feature 1..20: note = Synthetic oligonucleotide
  source 1..20: mol_type = other DNA
acggtgcgagtcagtctcac

SEQ ID NO: 1298 - DNA, 20 bp, synthetic construct
  misc_feature 1..20: note = Synthetic oligonucleotide
  source 1..20: mol_type = other DNA
tacggtgcgagtcagtctca

SEQ ID NO: 1299 - DNA, 20 bp, synthetic construct
  misc_feature 1..20: note = Synthetic oligonucleotide
  source 1..20: mol_type = other DNA
ctacggtgcgagtcagtctc

SEQ ID NO: 1300 - DNA, 20 bp, synthetic construct
  misc_feature 1..20: note = Synthetic oligonucleotide
  source 1..20: mol_type = other DNA
actacggtgcgagtcagtct

SEQ ID NO: 1301 - DNA, 20 bp, synthetic construct
  misc_feature 1..20: note = Synthetic oligonucleotide
  source 1..20: mol_type = other DNA
ccactacggtgcgagtcagt

SEQ ID NO: 1302 - DNA, 20 bp, synthetic construct
  misc_feature 1..20: note = Synthetic oligonucleotide
  source 1..20: mol_type = other DNA
accactacggtgcgagtcag

SEQ ID NO: 1303 - DNA, 20 bp, synthetic construct
  misc_feature 1..20: note = Synthetic oligonucleotide
  source 1..20: mol_type = other DNA
taccactacggtgcgagtca

SEQ ID NO: 1304 - DNA, 20 bp, synthetic construct
  misc_feature 1..20: note = Synthetic oligonucleotide
  source 1..20: mol_type = other DNA
ctaccactacggtgcgagtc

SEQ ID NO: 1305 - DNA, 20 bp, synthetic construct
  misc_feature 1..20: note = Synthetic oligonucleotide
  source 1..20: mol_type = other DNA
cctaccactacggtgcgagt

SEQ ID NO: 1306 - DNA, 20 bp, synthetic construct
  misc_feature 1..20: note = Synthetic oligonucleotide
  source 1..20: mol_type = other DNA
ccctaccactacggtgcgag

SEQ ID NO: 1307 - DNA, 20 bp, synthetic construct
  misc_feature 1..20: note = Synthetic oligonucleotide
  source 1..20: mol_type = other DNA
tccctaccactacggtgcga

SEQ ID NO: 1308 - DNA, 20 bp, synthetic construct
  misc_feature 1..20: note = Synthetic oligonucleotide
  source 1..20: mol_type = other DNA
ttccctaccactacggtgcg

SEQ ID NO: 1309 - DNA, 20 bp, synthetic construct
  misc_feature 1..20: note = Synthetic oligonucleotide
  source 1..20: mol_type = other DNA
agtattcgctggactaagtc

SEQ ID NO: 1310 - DNA, 20 bp, synthetic construct
  misc_feature 1..20: note = Synthetic oligonucleotide
  source 1..20: mol_type = other DNA
aagtattcgctggactaagt

SEQ ID NO: 1311 - DNA, 20 bp, synthetic construct
  misc_feature 1..20: note = Synthetic oligonucleotide
  source 1..20: mol_type = other DNA
aaagtattcgctggactaag

SEQ ID NO: 1312 - DNA, 20 bp, synthetic construct
  misc_feature 1..20: note = Synthetic oligonucleotide
  source 1..20: mol_type = other DNA
taaagtattcgctggactaa

SEQ ID NO: 1313 - DNA, 20 bp, synthetic construct
  misc_feature 1..20: note = Synthetic oligonucleotide
  source 1..20: mol_type = other DNA
ataaagtattcgctggacta

SEQ ID NO: 1314 - DNA, 20 bp, synthetic construct
  misc_feature 1..20: note = Synthetic oligonucleotide
  source 1..20: mol_type = other DNA
cataaagtattcgctggact

SEQ ID NO: 1315 - DNA, 20 bp, synthetic construct
  misc_feature 1..20: note = Synthetic oligonucleotide
  source 1..20: mol_type = other DNA
gacataaagtattcgctgga

SEQ ID NO: 1316 - DNA, 20 bp, synthetic construct
  misc_feature 1..20: note = Synthetic oligonucleotide
  source 1..20: mol_type = other DNA
ggacataaagtattcgctgg

SEQ ID NO: 1317 - DNA, 20 bp, synthetic construct
  misc_feature 1..20: note = Synthetic oligonucleotide
  source 1..20: mol_type = other DNA
gtagctcagagcaacggaga

SEQ ID NO: 1318 - DNA, 20 bp, synthetic construct
  misc_feature 1..20: note = Synthetic oligonucleotide
  source 1..20: mol_type = other DNA
ttcctcaccgtaatgaccac

SEQ ID NO: 1319 - DNA, 20 bp, synthetic construct
  misc_feature 1..20: note = Synthetic oligonucleotide
  source 1..20: mol_type = other DNA
gttcctcaccgtaatgacca

SEQ ID NO: 1320 - DNA, 20 bp, synthetic construct
  misc_feature 1..20: note = Synthetic oligonucleotide
  source 1..20: mol_type = other DNA
cgttcctcaccgtaatgacc

SEQ ID NO: 1321 - DNA, 20 bp, synthetic construct
  misc_feature 1..20: note = Synthetic oligonucleotide
  source 1..20: mol_type = other DNA
tcgttcctcaccgtaatgac

SEQ ID NO: 1322 - DNA, 20 bp, synthetic construct
  misc_feature 1..20: note = Synthetic oligonucleotide
  source 1..20: mol_type = other DNA
ctcgttcctcaccgtaatga

SEQ ID NO: 1323 - DNA, 20 bp, synthetic construct
  misc_feature 1..20: note = Synthetic oligonucleotide
  source 1..20: mol_type = other DNA
gctcgttcctcaccgtaatg

SEQ ID NO: 1324 - DNA, 20 bp, synthetic construct
  misc_feature 1..20: note = Synthetic oligonucleotide
  source 1..20: mol_type = other DNA
ggctcgttcctcaccgtaat

SEQ ID NO: 1325 - DNA, 20 bp, synthetic construct
  misc_feature 1..20: note = Synthetic oligonucleotide
  source 1..20: mol_type = other DNA
ggtacaagagcgggctcgtt

SEQ ID NO: 1326 - DNA, 20 bp, synthetic construct
  misc_feature 1..20: note = Synthetic oligonucleotide
  source 1..20: mol_type = other DNA
gggtacaagagcgggctcgt

SEQ ID NO: 1327 - DNA, 20 bp, synthetic construct
  misc_feature 1..20: note = Synthetic oligonucleotide
  source 1..20: mol_type = other DNA
ggggtacaagagcgggctcg

SEQ ID NO: 1328 - DNA, 20 bp, synthetic construct
  misc_feature 1..20: note = Synthetic oligonucleotide
  source 1..20: mol_type = other DNA
gaagcgtctgatgctggccc

SEQ ID NO: 1329 - DNA, 20 bp, synthetic construct
  misc_feature 1..20: note = Synthetic oligonucleotide
  source 1..20: mol_type = other DNA
ggaagcgtctgatgctggcc

SEQ ID NO: 1330 - DNA, 20 bp, synthetic construct
  misc_feature 1..20: note = Synthetic oligonucleotide
  source 1..20: mol_type = other DNA
aggaagcgtctgatgctggc

SEQ ID NO: 1331 - DNA, 20 bp, synthetic construct
  misc_feature 1..20: note = Synthetic oligonucleotide
  source 1..20: mol_type = other DNA
caggaagcgtctgatgctgg

SEQ ID NO: 1332 - DNA, 20 bp, synthetic construct
  misc_feature 1..20: note = Synthetic oligonucleotide
  source 1..20: mol_type = other DNA
ccaggaagcgtctgatgctg

SEQ ID NO: 1333 - DNA, 20 bp, synthetic construct
  misc_feature 1..20: note = Synthetic oligonucleotide
  source 1..20: mol_type = other DNA
tccaggaagcgtctgatgct

SEQ ID NO: 1334 - DNA, 20 bp, synthetic construct
  misc_feature 1..20: note = Synthetic oligonucleotide
  source 1..20: mol_type = other DNA
ttccaggaagcgtctgatgc

SEQ ID NO: 1335 - DNA, 20 bp, synthetic construct
  misc_feature 1..20: note = Synthetic oligonucleotide
  source 1..20: mol_type = other DNA
ggtttccaggaagcgtctga

SEQ ID NO: 1336 - DNA, 20 bp, synthetic construct
  misc_feature 1..20: note = Synthetic oligonucleotide
  source 1..20: mol_type = other DNA
agagccatcttgcggtgcct

SEQ ID NO: 1337 - DNA, 20 bp, synthetic construct
  misc_feature 1..20: note = Synthetic oligonucleotide
  source 1..20: mol_type = other DNA
aagagccatcttgcggtgcc

SEQ ID NO: 1338 - DNA, 20 bp, synthetic construct
  misc_feature 1..20: note = Synthetic oligonucleotide
  source 1..20: mol_type = other DNA
cactgaccggtctggcagtc

SEQ ID NO: 1339 - DNA, 20 bp, synthetic construct
  misc_feature 1..20: note = Synthetic oligonucleotide
  source 1..20: mol_type = other DNA
ccactgaccggtctggcagt

SEQ ID NO: 1340 - DNA, 20 bp, synthetic construct
  misc_feature 1..20: note = Synthetic oligonucleotide
  source 1..20: mol_type = other DNA
ggccactgaccggtctggca

SEQ ID NO: 1341 - DNA, 20 bp, synthetic construct
  misc_feature 1..20: note = Synthetic oligonucleotide
  source 1..20: mol_type = other DNA
aagcttccaatctggaaagt

SEQ ID NO: 1342 - DNA, 20 bp, synthetic construct
  misc_feature 1..20: note = Synthetic oligonucleotide
  source 1..20: mol_type = other DNA
atttttttcatgcggctttc

SEQ ID NO: 1343 - DNA, 20 bp, synthetic construct
  misc_feature 1..20: note = Synthetic oligonucleotide
  source 1..20: mol_type = other DNA
catttttttcatgcggcttt

SEQ ID NO: 1344 - DNA, 20 bp, synthetic construct
  misc_feature 1..20: note = Synthetic oligonucleotide
  source 1..20: mol_type = other DNA
ccatttttttcatgcggctt

SEQ ID NO: 1345 - DNA, 20 bp, synthetic construct
  misc_feature 1..20: note = Synthetic oligonucleotide
  source 1..20: mol_type = other DNA
tccatttttttcatgcggct

SEQ ID NO: 1346 - DNA, 20 bp, synthetic construct
  misc_feature 1..20: note = Synthetic oligonucleotide
  source 1..20: mol_type = other DNA
ctccatttttttcatgcggc

SEQ ID NO: 1347 - DNA, 20 bp, synthetic construct
  misc_feature 1..20: note = Synthetic oligonucleotide
  source 1..20: mol_type = other DNA
ggccttcacccgttcctcca

SEQ ID NO: 1348 - DNA, 20 bp, synthetic construct
  misc_feature 1..20: note = Synthetic oligonucleotide
  source 1..20: mol_type = other DNA
aggccttcacccgttcctcc

SEQ ID NO: 1349 - DNA, 20 bp, synthetic construct
  misc_feature 1..20: note = Synthetic oligonucleotide
  source 1..20: mol_type = other DNA
aggggccacaggccttcacc

SEQ ID NO: 1350 - DNA, 20 bp, synthetic construct
  misc_feature 1..20: note = Synthetic oligonucleotide
  source 1..20: mol_type = other DNA
gaggggccacaggccttcac

SEQ ID NO: 1351 - DNA, 20 bp, synthetic construct
  misc_feature 1..20: note = Synthetic oligonucleotide
  source 1..20: mol_type = other DNA
ggaggggccacaggccttca

SEQ ID NO: 1352 - DNA, 20 bp, synthetic construct
  misc_feature 1..20: note = Synthetic oligonucleotide
  source 1..20: mol_type = other DNA
acccttgtcagactcgcctt

SEQ ID NO: 1353 - DNA, 20 bp, synthetic construct
  misc_feature 1..20: note = Synthetic oligonucleotide
  source 1..20: mol_type = other DNA
aacccttgtcagactcgcct

SEQ ID NO: 1354 - DNA, 20 bp, synthetic construct
  misc_feature 1..20: note = Synthetic oligonucleotide
  source 1..20: mol_type = other DNA
acctgggggcaacaggctcc

SEQ ID NO: 1355 - DNA, 20 bp, synthetic construct
  misc_feature 1..20: note = Synthetic oligonucleotide
  source 1..20: mol_type = other DNA
cacctgggggcaacaggctc

SEQ ID NO: 1356 - DNA, 20 bp, synthetic construct
  misc_feature 1..20: note = Synthetic oligonucleotide
  source 1..20: mol_type = other DNA
ggggatattcgcaccagcca

SEQ ID NO: 1357 - DNA, 20 bp, synthetic construct
  misc_feature 1..20: note = Synthetic oligonucleotide
  source 1..20: mol_type = other DNA
aggggatattcgcaccagcc

SEQ ID NO: 1358 - DNA, 20 bp, synthetic construct
  misc_feature 1..20: note = Synthetic oligonucleotide
  source 1..20: mol_type = other DNA
caggggatattcgcaccagc

SEQ ID NO: 1359 - DNA, 20 bp, synthetic construct
  misc_feature 1..20: note = Synthetic oligonucleotide
  source 1..20: mol_type = other DNA
acaggggatattcgcaccag

SEQ ID NO: 1360 - DNA, 20 bp, synthetic construct
  misc_feature 1..20: note = Synthetic oligonucleotide
  source 1..20: mol_type = other DNA
cacaggggatattcgcacca

SEQ ID NO: 1361 - DNA, 20 bp, synthetic construct
  misc_feature 1..20: note = Synthetic oligonucleotide
  source 1..20: mol_type = other DNA
ctcccagggcgctatctgag

SEQ ID NO: 1362 - DNA, 20 bp, synthetic construct
  misc_feature 1..20: note = Synthetic oligonucleotide
  source 1..20: mol_type = other DNA
tctcccagggcgctatctga

SEQ ID NO: 1363 - DNA, 20 bp, synthetic construct
  misc_feature 1..20: note = Synthetic oligonucleotide
  source 1..20: mol_type = other DNA
caggcttcgtcgtcactgtc

SEQ ID NO: 1364 - DNA, 20 bp, synthetic construct
  misc_feature 1..20: note = Synthetic oligonucleotide
  source 1..20: mol_type = other DNA
gcaggcttcgtcgtcactgt

SEQ ID NO: 1365 - DNA, 20 bp, synthetic construct
  misc_feature 1..20: note = Synthetic oligonucleotide
  source 1..20: mol_type = other DNA
cgcaggcttcgtcgtcactg

SEQ ID NO: 1366 - DNA, 20 bp, synthetic construct
  misc_feature 1..20: note = Synthetic oligonucleotide
  source 1..20: mol_type = other DNA
aagcgcaggcttcgtcgtca

SEQ ID NO: 1367 - DNA, 20 bp, synthetic construct
  misc_feature 1..20: note = Synthetic oligonucleotide
  source 1..20: mol_type = other DNA
gctccacttccaaggaccct

SEQ ID NO: 1368 - DNA, 20 bp, synthetic construct
  misc_feature 1..20: note = Synthetic oligonucleotide
  source 1..20: mol_type = other DNA
agctccacttccaaggaccc

SEQ ID NO: 1369 - DNA, 20 bp, synthetic construct
  misc_feature 1..20: note = Synthetic oligonucleotide
  source 1..20: mol_type = other DNA
gcccgccagaagtgagcggc

SEQ ID NO: 1370 - DNA, 20 bp, synthetic construct
  misc_feature 1..20: note = Synthetic oligonucleotide
  source 1..20: mol_type = other DNA
agcccgccagaagtgagcgg

SEQ ID NO: 1371 - DNA, 20 bp, synthetic construct
  misc_feature 1..20: note = Synthetic oligonucleotide
  source 1..20: mol_type = other DNA
gtctgcgataatacagacag

SEQ ID NO: 1372 - DNA, 20 bp, synthetic construct
  misc_feature 1..20: note = Synthetic oligonucleotide
  source 1..20: mol_type = other DNA
tgtctgcgataatacagaca

SEQ ID NO: 1373 - DNA, 20 bp, synthetic construct
  misc_feature 1..20: note = Synthetic oligonucleotide
  source 1..20: mol_type = other DNA
ttatccgtgtctgcgataat

SEQ ID NO: 1374 - DNA, 20 bp, synthetic construct
  misc_feature 1..20: note = Synthetic oligonucleotide
  source 1..20: mol_type = other DNA
tttatccgtgtctgcgataa

SEQ ID NO: 1375 - DNA, 20 bp, synthetic construct
  misc_feature 1..20: note = Synthetic oligonucleotide
  source 1..20: mol_type = other DNA
atttatccgtgtctgcgata

SEQ ID NO: 1376 - DNA, 20 bp, synthetic construct
  misc_feature 1..20: note = Synthetic oligonucleotide
  source 1..20: mol_type = other DNA
agaccaggacatcctggcct

SEQ ID NO: 1377 - DNA, 20 bp, synthetic construct
  misc_feature 1..20: note = Synthetic oligonucleotide
  source 1..20: mol_type = other DNA
tgtagtctatcttcaagatg

SEQ ID NO: 1378 - DNA, 20 bp, synthetic construct
  misc_feature 1..20: note = Synthetic oligonucleotide
  source 1..20: mol_type = other DNA
agtacgacacctaattcttt

SEQ ID NO: 1379 - DNA, 20 bp, synthetic construct
  misc_feature 1..20: note = Synthetic oligonucleotide
  source 1..20: mol_type = other DNA
cagtacgacacctaattctt

SEQ ID NO: 1380 - DNA, 20 bp, synthetic construct
  misc_feature 1..20: note = Synthetic oligonucleotide
  source 1..20: mol_type = other DNA
ccagtacgacacctaattct

SEQ ID NO: 1381 - DNA, 20 bp, synthetic construct
  misc_feature 1..20: note = Synthetic oligonucleotide
  source 1..20: mol_type = other DNA
cccagtacgacacctaattc

SEQ ID NO: 1382 - DNA, 20 bp, synthetic construct
  misc_feature 1..20: note = Synthetic oligonucleotide
  source 1..20: mol_type = other DNA
ccccagtacgacacctaatt

SEQ ID NO: 1383 - DNA, 20 bp, synthetic construct
  misc_feature 1..20: note = Synthetic oligonucleotide
  source 1..20: mol_type = other DNA
accccagtacgacacctaat

SEQ ID NO: 1384 - DNA, 20 bp, synthetic construct
  misc_feature 1..20: note = Synthetic oligonucleotide
  source 1..20: mol_type = other DNA
caccccagtacgacacctaa

SEQ ID NO: 1385 - DNA, 20 bp, synthetic construct
  misc_feature 1..20: note = Synthetic oligonucleotide
  source 1..20: mol_type = other DNA
tcaccccagtacgacaccta

SEQ ID NO: 1386 - DNA, 20 bp, synthetic construct
  misc_feature 1..20: note = Synthetic oligonucleotide
  source 1..20: mol_type = other DNA
ctcaccccagtacgacacct

SEQ ID NO: 1387 - DNA, 20 bp, synthetic construct
  misc_feature 1..20: note = Synthetic oligonucleotide
  source 1..20: mol_type = other DNA
aactcaccccagtacgacac

SEQ ID NO: 1388 - DNA, 20 bp, synthetic construct
  misc_feature 1..20: note = Synthetic oligonucleotide
  source 1..20: mol_type = other DNA
gaactcaccccagtacgaca

SEQ ID NO: 1389 - DNA, 20 bp, synthetic construct
  misc_feature 1..20: note = Synthetic oligonucleotide
  source 1..20: mol_type = other DNA
ggtcgttggattcaatcctg

SEQ ID NO: 1390 - DNA, 20 bp, synthetic construct
  misc_feature 1..20: note = Synthetic oligonucleotide
  source 1..20: mol_type = other DNA
aggtcgttggattcaatcct

SEQ ID NO: 1391 - DNA, 20 bp, synthetic construct
  misc_feature 1..20: note = Synthetic oligonucleotide
  source 1..20: mol_type = other DNA
caggtcgttggattcaatcc

SEQ ID NO: 1392 - DNA, 20 bp, synthetic construct
  misc_feature 1..20: note = Synthetic oligonucleotide
  source 1..20: mol_type = other DNA
gcaggtcgttggattcaatc

SEQ ID NO: 1393 - DNA, 20 bp, synthetic construct
  misc_feature 1..20: note = Synthetic oligonucleotide
  source 1..20: mol_type = other DNA
ggcaggtcgttggattcaat

SEQ ID NO: 1394 - DNA, 20 bp, synthetic construct
  misc_feature 1..20: note = Synthetic oligonucleotide
  source 1..20: mol_type = other DNA
aggcaggtcgttggattcaa

SEQ ID NO: 1395 - DNA, 20 bp, synthetic construct
  misc_feature 1..20: note = Synthetic oligonucleotide
  source 1..20: mol_type = other DNA
agaggcaggtcgttggattc

SEQ ID NO: 1396 - DNA, 20 bp, synthetic construct
  misc_feature 1..20: note = Synthetic oligonucleotide
  source 1..20: mol_type = other DNA
cagagagcttattcctttct

SEQ ID NO: 1397 - DNA, 20 bp, synthetic construct
  misc_feature 1..20: note = Synthetic oligonucleotide
  source 1..20: mol_type = other DNA
attatgtcaagtaaacctaa

SEQ ID NO: 1398 - DNA, 20 bp, synthetic construct
  misc_feature 1..20: note = Synthetic oligonucleotide
  source 1..20: mol_type = other DNA
agtgttcacgacaatcacaa

SEQ ID NO: 1399 - DNA, 20 bp, synthetic construct
  misc_feature 1..20: note = Synthetic oligonucleotide
  source 1..20: mol_type = other DNA
aagtgttcacgacaatcaca

SEQ ID NO: 1400 - DNA, 20 bp, synthetic construct
  misc_feature 1..20: note = Synthetic oligonucleotide
  source 1..20: mol_type = other DNA
taaagtgttcacgacaatca

SEQ ID NO: 1401 - DNA, 20 bp, synthetic construct
  misc_feature 1..20: note = Synthetic oligonucleotide
  source 1..20: mol_type = other DNA
ctaaagtgttcacgacaatc

SEQ ID NO: 1402 - DNA, 20 bp, synthetic construct
  misc_feature 1..20: note = Synthetic oligonucleotide
  source 1..20: mol_type = other DNA
cctaaagtgttcacgacaat

SEQ ID NO: 1403 - DNA, 20 bp, synthetic construct
  misc_feature 1..20: note = Synthetic oligonucleotide
  source 1..20: mol_type = other DNA
agcagtttcctactggaata

SEQ ID NO: 1404 - DNA, 20 bp, synthetic construct
  misc_feature 1..20: note = Synthetic oligonucleotide
  source 1..20: mol_type = other DNA
atgttttctccagtttgggg

SEQ ID NO: 1405 - DNA, 20 bp, synthetic construct
  misc_feature 1..20: note = Synthetic oligonucleotide
  source 1..20: mol_type = other DNA
tatgttttctccagtttggg

SEQ ID NO: 1406 - DNA, 20 bp, synthetic construct
  misc_feature 1..20: note = Synthetic oligonucleotide
  source 1..20: mol_type = other DNA
tttattgcaccaacaatcca

SEQ ID NO: 1407 - DNA, 20 bp, synthetic construct
  misc_feature 1..20: note = Synthetic oligonucleotide
  source 1..20: mol_type = other DNA
gtttattgcaccaacaatcc

SEQ ID NO: 1408 - DNA, 20 bp, synthetic construct
  misc_feature 1..20: note = Synthetic oligonucleotide
  source 1..20: mol_type = other DNA
ggtttattgcaccaacaatc

SEQ ID NO: 1409 - DNA, 20 bp, synthetic construct
  misc_feature 1..20: note = Synthetic oligonucleotide
  source 1..20: mol_type = other DNA
gggtttattgcaccaacaat

SEQ ID NO: 1410 - DNA, 20 bp, synthetic construct
  misc_feature 1..20: note = Synthetic oligonucleotide
  source 1..20: mol_type = other DNA
catacggtttcagactgtac

SEQ ID NO: 1411 - DNA, 20 bp, synthetic construct
  misc_feature 1..20: note = Synthetic oligonucleotide
  source 1..20: mol_type = other DNA
acatacggtttcagactgta

SEQ ID NO: 1412 - DNA, 20 bp, synthetic construct
  misc_feature 1..20: note = Synthetic oligonucleotide
  source 1..20: mol_type = other DNA
aacatacggtttcagactgt

SEQ ID NO: 1413 - DNA, 20 bp, synthetic construct
  misc_feature 1..20: note = Synthetic oligonucleotide
  source 1..20: mol_type = other DNA
ataaaacatacggtttcaga

SEQ ID NO: 1414 - DNA, 20 bp, synthetic construct
  misc_feature 1..20: note = Synthetic oligonucleotide
  source 1..20: mol_type = other DNA
ccaaccgaaacactcttgag

SEQ ID NO: 1415 - DNA, 20 bp, synthetic construct
  misc_feature 1..20: note = Synthetic oligonucleotide
  source 1..20: mol_type = other DNA
accaaccgaaacactcttga

SEQ ID NO: 1416 - DNA, 20 bp, synthetic construct
  misc_feature 1..20: note = Synthetic oligonucleotide
  source 1..20: mol_type = other DNA
taccaaccgaaacactcttg

SEQ ID NO: 1417 - DNA, 20 bp, synthetic construct
  misc_feature 1..20: note = Synthetic oligonucleotide
  source 1..20: mol_type = other DNA
ttaccaaccgaaacactctt

SEQ ID NO: 1418 - DNA, 20 bp, synthetic construct
  misc_feature 1..20: note = Synthetic oligonucleotide
  source 1..20: mol_type = other DNA
aacttaccaaccgaaacact

SEQ ID NO: 1419 - DNA, 20 bp, synthetic construct
  misc_feature 1..20: note = Synthetic oligonucleotide
  source 1..20: mol_type = other DNA
gaacttaccaaccgaaacac

SEQ ID NO: 1420 - DNA, 20 bp, synthetic construct
  misc_feature 1..20: note = Synthetic oligonucleotide
  source 1..20: mol_type = other DNA
agaacttaccaaccgaaaca

SEQ ID NO: 1421 - DNA, 20 bp, synthetic construct
  misc_feature 1..20: note = Synthetic oligonucleotide
  source 1..20: mol_type = other DNA
aatgataatataaaaattta

SEQ ID NO: 1422 - DNA, 20 bp, synthetic construct
  misc_feature 1..20: note = Synthetic oligonucleotide
  source 1..20: mol_type = other DNA
aaatgataatataaaaattt

SEQ ID NO: 1423 - DNA, 20 bp, synthetic construct
  misc_feature 1..20: note = Synthetic oligonucleotide
  source 1..20: mol_type = other DNA
gaaatgataatataaaaatt

SEQ ID NO: 1424 - DNA, 20 bp, synthetic construct
  misc_feature 1..20: note = Synthetic oligonucleotide
  source 1..20: mol_type = other DNA
aaaagtcttttactttaccc

SEQ ID NO: 1425 - DNA, 20 bp, synthetic construct
  misc_feature 1..20: note = Synthetic oligonucleotide
  source 1..20: mol_type = other DNA
tttaaaagtcttttacttta

SEQ ID NO: 1426 - DNA, 20 bp, synthetic construct
  misc_feature 1..20: note = Synthetic oligonucleotide
  source 1..20: mol_type = other DNA
atgaccaatatttaaaagtc

SEQ ID NO: 1427 - DNA, 20 bp, synthetic construct
  misc_feature 1..20: note = Synthetic oligonucleotide
  source 1..20: mol_type = other DNA
gcaaagtgctaaagatgttt

SEQ ID NO: 1428 - DNA, 20 bp, synthetic construct
  misc_feature 1..20: note = Synthetic oligonucleotide
  source 1..20: mol_type = other DNA
tgcaaagtgctaaagatgtt

SEQ ID NO: 1429 - DNA, 20 bp, synthetic construct
  misc_feature 1..20: note = Synthetic oligonucleotide
  source 1..20: mol_type = other DNA
gaactggaattaattcataa

SEQ ID NO: 1430 - DNA, 20 bp, synthetic construct
  misc_feature 1..20: note = Synthetic oligonucleotide
  source 1..20: mol_type = other DNA
aaaacttaatgcactcatct

SEQ ID NO: 1431 - DNA, 20 bp, synthetic construct
  misc_feature 1..20: note = Synthetic oligonucleotide
  source 1..20: mol_type = other DNA
caaaacttaatgcactcatc

SEQ ID NO: 1432 - DNA, 20 bp, synthetic construct
  misc_feature 1..20: note = Synthetic oligonucleotide
  source 1..20: mol_type = other DNA
agaatgaacatttcaatttt

SEQ ID NO: 1433 - DNA, 20 bp, synthetic construct
  misc_feature 1..20: note = Synthetic oligonucleotide
  source 1..20: mol_type = other DNA
aagaatgaacatttcaattt

SEQ ID NO: 1434 - DNA, 20 bp, synthetic construct
  misc_feature 1..20: note = Synthetic oligonucleotide
  source 1..20: mol_type = other DNA
tgtcccctatatgggtctaa

SEQ ID NO: 1435 - DNA, 20 bp, synthetic construct
  misc_feature 1..20: note = Synthetic oligonucleotide
  source 1..20: mol_type = other DNA
gtgtcccctatatgggtcta

SEQ ID NO: 1436 - DNA, 20 bp, synthetic construct
  misc_feature 1..20: note = Synthetic oligonucleotide
  source 1..20: mol_type = other DNA
agtgtcccctatatgggtct

SEQ ID NO: 1437 - DNA, 20 bp, synthetic construct
  misc_feature 1..20: note = Synthetic oligonucleotide
  source 1..20: mol_type = other DNA
ggcatttttccaagagtgag

SEQ ID NO: 1438 - DNA, 20 bp, synthetic construct
  misc_feature 1..20: note = Synthetic oligonucleotide
  source 1..20: mol_type = other DNA
atttaaaggattataaaaga

SEQ ID NO: 1439 - DNA, 20 bp, synthetic construct
  misc_feature 1..20: note = Synthetic oligonucleotide
  source 1..20: mol_type = other DNA
tgtgagcggtggatctcaac

SEQ ID NO: 1440 - DNA, 20 bp, synthetic construct
  misc_feature 1..20: note = Synthetic oligonucleotide
  source 1..20: mol_type = other DNA
gtgtgagcggtggatctcaa

SEQ ID NO: 1441 - DNA, 20 bp, synthetic construct
  misc_feature 1..20: note = Synthetic oligonucleotide
  source 1..20: mol_type = other DNA
cgtgtgagcggtggatctca

SEQ ID NO: 1442 - DNA, 20 bp, synthetic construct
  misc_feature 1..20: note = Synthetic oligonucleotide
  source 1..20: mol_type = other DNA
gcgtgtgagcggtggatctc

SEQ ID NO: 1443 - DNA, 20 bp, synthetic construct
  misc_feature 1..20: note = Synthetic oligonucleotide
  source 1..20: mol_type = other DNA
ggcgtgtgagcggtggatct

SEQ ID NO: 1444 - DNA, 20 bp, synthetic construct
  misc_feature 1..20: note = Synthetic oligonucleotide
  source 1..20: mol_type = other DNA
acggcgtgtgagcggtggat

SEQ ID NO: 1445 - DNA, 20 bp, synthetic construct
  misc_feature 1..20: note = Synthetic oligonucleotide
  source 1..20: mol_type = other DNA
tacggcgtgtgagcggtgga

SEQ ID NO: 1446 - DNA, 20 bp, synthetic construct
  misc_feature 1..20: note = Synthetic oligonucleotide
  source 1..20: mol_type = other DNA
gtacggcgtgtgagcggtgg

SEQ ID NO: 1447 - DNA, 20 bp, synthetic construct
  misc_feature 1..20: note = Synthetic oligonucleotide
  source 1..20: mol_type = other DNA
tgtacggcgtgtgagcggtg

SEQ ID NO: 1448 - DNA, 20 bp, synthetic construct
  misc_feature 1..20: note = Synthetic oligonucleotide
  source 1..20: mol_type = other DNA
gtgtacggcgtgtgagcggt

SEQ ID NO: 1449 - DNA, 20 bp, synthetic construct
  misc_feature 1..20: note = Synthetic oligonucleotide
  source 1..20: mol_type = other DNA
tggtgtacggcgtgtgagcg

SEQ ID NO: 1450 - DNA, 20 bp, synthetic construct
  misc_feature 1..20: note = Synthetic oligonucleotide
  source 1..20: mol_type = other DNA
gtggtgtacggcgtgtgagc

SEQ ID NO: 1451 - DNA, 20 bp, synthetic construct
  misc_feature 1..20: note = Synthetic oligonucleotide
  source 1..20: mol_type = other DNA
ggtggtgtacggcgtgtgag

SEQ ID NO: 1452 - DNA, 20 bp, synthetic construct
  misc_feature 1..20: note = Synthetic oligonucleotide
  source 1..20: mol_type = other DNA
tgggtggtgtacggcgtgtg

SEQ ID NO: 1453 - DNA, 20 bp, synthetic construct
  misc_feature 1..20: note = Synthetic oligonucleotide
  source 1..20: mol_type = other DNA
ctgggtggtgtacggcgtgt

SEQ ID NO: 1454 - DNA, 20 bp, synthetic construct
  misc_feature 1..20: note = Synthetic oligonucleotide
  source 1..20: mol_type = other DNA
cactgggtggtgtacggcgt

SEQ ID NO: 1455 - DNA, 20 bp, synthetic construct
  misc_feature 1..20: note = Synthetic oligonucleotide
  source 1..20: mol_type = other DNA
cctctgcggctaagccagaa

SEQ ID NO: 1456 - DNA, 20 bp, synthetic construct
  misc_feature 1..20: note = Synthetic oligonucleotide
  source 1..20: mol_type = other DNA
gcctctgcggctaagccaga

SEQ ID NO: 1457 - DNA, 20 bp, synthetic construct
  misc_feature 1..20: note = Synthetic oligonucleotide
  source 1..20: mol_type = other DNA
tgcctctgcggctaagccag

SEQ ID NO: 1458 - DNA, 20 bp, synthetic construct
  misc_feature 1..20: note = Synthetic oligonucleotide
  source 1..20: mol_type = other DNA
tttaaaaaaaattgttttat

SEQ ID NO: 1459 - DNA, 20 bp, synthetic construct
  misc_feature 1..20: note = Synthetic oligonucleotide
  source 1..20: mol_type = other DNA
ttttaaaaaaaattgtttta

SEQ ID NO: 1460 - DNA, 20 bp, synthetic construct
  misc_feature 1..20: note = Synthetic oligonucleotide
  source 1..20: mol_type = other DNA
tgaagaaaccctaaaggtgg

SEQ ID NO: 1461 - DNA, 20 bp, synthetic construct
  misc_feature 1..20: note = Synthetic oligonucleotide
  source 1..20: mol_type = other DNA
ttaaaagttgaagaaaccct

SEQ ID NO: 1462 - DNA, 20 bp, synthetic construct
  misc_feature 1..20: note = Synthetic oligonucleotide
  source 1..20: mol_type = other DNA
tttacagacttctgctctgt

SEQ ID NO: 1463 - DNA, 20 bp, synthetic construct
  misc_feature 1..20: note = Synthetic oligonucleotide
  source 1..20: mol_type = other DNA
atttacagacttctgctctg

SEQ ID NO: 1464 - DNA, 20 bp, synthetic construct
  misc_feature 1..20: note = Synthetic oligonucleotide
  source 1..20: mol_type = other DNA
ccaatttattaaaaataaaa

SEQ ID NO: 1465 - DNA, 20 bp, synthetic construct
  misc_feature 1..20: note = Synthetic oligonucleotide
  source 1..20: mol_type = other DNA
accaatttattaaaaataaa

SEQ ID NO: 1466 - DNA, 20 bp, synthetic construct
  misc_feature 1..20: note = Synthetic oligonucleotide
  source 1..20: mol_type = other DNA
tacacaattacctttacatt

SEQ ID NO: 1467 - DNA, 20 bp, synthetic construct
  misc_feature 1..20: note = Synthetic oligonucleotide
  source 1..20: mol_type = other DNA
cgtacacaattacctttaca

SEQ ID NO: 1468 - DNA, 20 bp, synthetic construct
  misc_feature 1..20: note = Synthetic oligonucleotide
  source 1..20: mol_type = other DNA
cattttaaattttcattgtc

SEQ ID NO: 1469 - DNA, 20 bp, synthetic construct
  misc_feature 1..20: note = Synthetic oligonucleotide
  source 1..20: mol_type = other DNA
gataaaaaataaaatacttt

SEQ ID NO: 1470 - DNA, 20 bp, synthetic construct
  misc_feature 1..20: note = Synthetic oligonucleotide
  source 1..20: mol_type = other DNA
tgataaaaaataaaatactt

SEQ ID NO: 1471 - DNA, 20 bp, synthetic construct
  misc_feature 1..20: note = Synthetic oligonucleotide
  source 1..20: mol_type = other DNA
ttgataaaaaataaaatact

SEQ ID NO: 1472 - DNA, 20 bp, synthetic construct
  misc_feature 1..20: note = Synthetic oligonucleotide
  source 1..20: mol_type = other DNA
attgataaaaaataaaatac

SEQ ID NO: 1473 - DNA, 20 bp, synthetic construct
  misc_feature 1..20: note = Synthetic oligonucleotide
  source 1..20: mol_type = other DNA
actgattgataaaaaataaa

SEQ ID NO: 1474 - DNA, 20 bp, synthetic construct
  misc_feature 1..20: note = Synthetic oligonucleotide
  source 1..20: mol_type = other DNA
aaacagcacacttcgaaaaa

SEQ ID NO: 1475 - DNA, 20 bp, synthetic construct
  misc_feature 1..20: note = Synthetic oligonucleotide
  source 1..20: mol_type = other DNA
ttactttcattaaaaaacag

SEQ ID NO: 1476 - DNA, 20 bp, synthetic construct
  misc_feature 1..20: note = Synthetic oligonucleotide
  source 1..20: mol_type = other DNA
tgtgtaaacggcagttccat

SEQ ID NO: 1477 - DNA, 20 bp, synthetic construct
  misc_feature 1..20: note = Synthetic oligonucleotide
  source 1..20: mol_type = other DNA
acaacggtttagtatcattt

SEQ ID NO: 1478 - DNA, 20 bp, synthetic construct
  misc_feature 1..20: note = Synthetic oligonucleotide
  source 1..20: mol_type = other DNA
agagcccaaacaacggttta

SEQ ID NO: 1479 - DNA, 20 bp, synthetic construct
  misc_feature 1..20: note = Synthetic oligonucleotide
  source 1..20: mol_type = other DNA
attagcggaaaaatccagac

SEQ ID NO: 1480 - DNA, 20 bp, synthetic construct
  misc_feature 1..20: note = Synthetic oligonucleotide
  source 1..20: mol_type = other DNA
tattagcggaaaaatccaga

SEQ ID NO: 1481 - DNA, 20 bp, synthetic construct
  misc_feature 1..20: note = Synthetic oligonucleotide
  source 1..20: mol_type = other DNA
aagtacatattagcggaaaa

SEQ ID NO: 1482 - DNA, 20 bp, synthetic construct
  misc_feature 1..20: note = Synthetic oligonucleotide
  source 1..20: mol_type = other DNA
aaagtacatattagcggaaa

SEQ ID NO: 1483 - DNA, 20 bp, synthetic construct
  misc_feature 1..20: note = Synthetic oligonucleotide
  source 1..20: mol_type = other DNA
ttctctaaagtacatattag

SEQ ID NO: 1484 - DNA, 20 bp, synthetic construct
  misc_feature 1..20: note = Synthetic oligonucleotide
  source 1..20: mol_type = other DNA
attctctaaagtacatatta

SEQ ID NO: 1485 - DNA, 20 bp, synthetic construct
  misc_feature 1..20: note = Synthetic oligonucleotide
  source 1..20: mol_type = other DNA
aatattctctaaagtacata

SEQ ID NO: 1486 - DNA, 20 bp, synthetic construct
  misc_feature 1..20: note = Synthetic oligonucleotide
  source 1..20: mol_type = other DNA
atgaacaaaatattctctaa

SEQ ID NO: 1487 - DNA, 20 bp, synthetic construct
  misc_feature 1..20: note = Synthetic oligonucleotide
  source 1..20: mol_type = other DNA
catgaacaaaatattctcta

SEQ ID NO: 1488 - DNA, 20 bp, synthetic construct
  misc_feature 1..20: note = Synthetic oligonucleotide
  source 1..20: mol_type = other DNA
agtatgcatgaacaaaatat

SEQ ID NO: 1489 - DNA, 20 bp, synthetic construct
  misc_feature 1..20: note = Synthetic oligonucleotide
  source 1..20: mol_type = other DNA
aattatattaaaataccctc

SEQ ID NO: 1490 - DNA, 20 bp, synthetic construct
  misc_feature 1..20: note = Synthetic oligonucleotide
  source 1..20: mol_type = other DNA
aaaattatattaaaataccc

SEQ ID NO: 1491 - DNA, 20 bp, synthetic construct
  misc_feature 1..20: note = Synthetic oligonucleotide
  source 1..20: mol_type = other DNA
aaaaattatattaaaatacc

SEQ ID NO: 1492 - DNA, 20 bp, synthetic construct
  misc_feature 1..20: note = Synthetic oligonucleotide
  source 1..20: mol_type = other DNA
tcaagatatatcgttcatca

SEQ ID NO: 1493 - DNA, 20 bp, synthetic construct
  misc_feature 1..20: note = Synthetic oligonucleotide
  source 1..20: mol_type = other DNA
ttcaagatatatcgttcatc

SEQ ID NO: 1494 - DNA, 20 bp, synthetic construct
  misc_feature 1..20: note = Synthetic oligonucleotide
  source 1..20: mol_type = other DNA
tttcaagatatatcgttcat

What is claimed is:

1. A compound comprising a modified oligonucleotide consisting of 12 to 30 linked nucleosides and having a nucleobase sequence that is at least 70%, at least 80%, at least 85%, at least 90%, at least 95%, at least 98%, or 100% complementary to an equal length portion of SEQ ID NO: 1 or SEQ ID NO: 11,
wherein the thymine bases are optionally uracil bases, and
wherein the oligonucleotide comprises at least one modified sugar, at least one modified internucleoside linkage, or at least one modified nucleobase.

2. The compound of claim 1, wherein the modified oligonucleotide consists of at least 8, at least 9, at least 10, at least 11, or at least 12 consecutive nucleobases with at least 70%, at least 80%, at least 85%, at least 90%, at least 95%, at least 98% or 100% sequence identity to any one of the nucleobase sequences of SEQ ID NOs: 16-1494.

3. The compound of claim 1, wherein the modified oligonucleotide comprises a nucleobase sequence selected from SEQ ID NOs: 16, 19, 20, 22, 23, 26, 28, 30, 43, 49, 70, 148, 155, 191, 259, 287, 304, 349, 385, 477, 593, 787, 804, 865, 912, 975, 978, 1083, 1085, 1197, 1198, 1199, 1200, 1202, 1205, and 1206.

4. The compound of claim 1, wherein the modified oligonucleotide comprises at least one 2′-O-methoxyethyl (2′-MOE) modified sugar.

5. The compound of claim 1, wherein the modified oligonucleotide comprises at least one 2′-O-methyl (2′-OMe) modified sugar.

6. The compound of claim 1, wherein the modified oligonucleotide comprises at least one bicyclic sugar.

7. The compound of claim 6, wherein each bicyclic sugar comprises a chemical bridge between the 4′ and 2′ positions of the sugar, wherein each chemical bridge is independently selected from: 4′-CH(R)—O-2′ and 4′ (CH₂)₂—O-2′, wherein R is independently selected from H, C₁-C₁₂ alkyl, or a protecting group.

8. The compound of claim 1, wherein the modified oligonucleotide comprises at least one phosphorothioate internucleoside linkage.

9. The compound of claim 8, wherein each internucleoside linkage of the modified oligonucleotide is a phosphorothioate internucleoside linkage.

10. The compound of claim 8, wherein the modified oligonucleotide comprises at least one phosphodiester internucleoside linkage.

11. The compound of claim 1, wherein the modified oligonucleotide comprises at least one 5-methylcytosine modified nucleobase.

12. The compound of claim 1, wherein the modified oligonucleotide comprises a gapped sequence, which gapped sequence comprises:
a central sequence of linked deoxynucleosides; and
wing sequences flanking both the 5′ and the 3′ ends of the central sequence, wherein at least one nucleoside of the wing sequences comprises a modified sugar.

13. The compound of claim 12, wherein the central sequence is chosen to consist of 6, 7, 8, 9, 10, 11 or 12 linked nucleosides and the wing sequences are each independently chosen to consist of 3, 4, 5, or 6 linked nucleosides.

14. The compound of claim 12, wherein the central sequence consists of 10 linked nucleosides and the wing sequences each consist of 4 linked nucleosides.

15. The compound of claim 12, wherein the wing sequences comprise at least one nucleoside consisting of a 2′-O-methoxyethyl modified sugar.

16. A composition comprising the compound of claim 1, or salt thereof, and at least one of a pharmaceutically acceptable carrier or diluent.

17. A method comprising administering the compound of claim 1, or a pharmaceutical composition comprising the compound of claim 1, to a cell, animal, or human.

18. A method to treat, prevent or ameliorate a TDP-43 proteinopathy, neurodegenerative or neuromuscular disease in a subject, comprising administering the compound of claim 1, or a pharmaceutical composition comprising the compound of claim 1, to the subject.

19. The method of claim 18, wherein the TDP-43 proteinopathy, neurodegenerative or neuromuscular disease is amyotrophic lateral sclerosis, frontotemporal lobar degeneration, age-related macular degeneration, or Alzheimer's disease.

20. A method of inhibiting expression of FNIP1 and/or FNIP2 in cells or tissues, comprising administering the compound of claim 1, or a pharmaceutical composition comprising the compound of claim 1, to the subject, such that the expression of FNIP1 and/or FNIP2 is inhibited.
